United States Patent Application Publication US 2022/0008368 A1 - sequence listing, part 23

SEQ ID NO: 2 - DNA, 58617616 bp, Homo sapiens (residues 47,762,507-49,933,529 of 58,617,616)
  modified_base (1)..(60000): a, c, t, g, unknown or other
  modified_base (24448981)..(24498980): a, c, t, g, unknown or other
  modified_base (24552653)..(24552752): a, c, t, g, unknown or other
  modified_base (24891257)..(24891356): a, c, t, g, unknown or other
  modified_base (24895791)..(24895890): a, c, t, g, unknown or other
  modified_base (24898314)..(24904771): a, c, t, g, unknown or other
  modified_base (24908590)..(24908689): a, c, t, g, unknown or other
  modified_base (27190875)..(27240874): a, c, t, g, unknown or other
  modified_base (58607617)..(58617616): a, c, t, g, unknown or other
cactacactctagcctgggcaacagagtgagaccctgtctattttttttcctttttgagtctcgctctgtcacccaggctggagtgcaatgatgcgatcctggctcactgtaatctccgccaccctgtctctttaaaaaacaaaaacaaaaacaaaaacaaaccatggagaccatctgtaggcagcagtatggggttgtgaagagcatggtggagtccgtgtcctgatttcagacccgctctgttacatactggctgtgtgatgttgtgcaggttactcaacctctctgtgcctcagtgtcatatctgtaaaatggacataacaatagtgcttatcttgctgtgggttattacaaggatgagtgagtctgcacggaaagcgatcggaacaggccctggcacaggggaagctctaggtgagcatttgctgttataacaatgttagggtaggggaagatgattttaaaaagatgcagaaacttgcaatttgtgccagaggctcctcccaaatgctctgaccctttgacgcagtgattgcacgcttgggaacgtggcctacagaaacagccggaagttggggaagagcattttgcacaggccggtccttgagaacgttctgcagaatgggaggaaacgtggtcatggacatggggcgggccctggccacatggacgccacctctgtggccattaactgaggggtcggaagtgcctgcagccactgggaggtgtttgtgtttggatactttgtgggaaaaagcaaacaggatctgctgccgtccacactggcgttcatcagacaaacccccatgccaaaagtctcttgagtgggaggatttcagaggactccttcttactcttttttccagcatttccaatttttttttttttttttgagaaagggtctcattctggagcacagtggctctgtctcagctcactgcagcctcaacctcctgggcttaagtgatcccctaaactcagcctcctgagtagctgagacttacaggcccacgccaccatgcctggctaatttttttctttttgtatttttagtagagacagggttttgccatgttgcccaggctggtctcaaactcctgaccccaagtgatccacccacctcggcctcccaaagtgctgggattacagatgtgagccattgagccaggccccaaattttctgtaatggagcaaacttgaaaaaaaaggaatcgacaggattcttcctttgtttttgtttttgagatagaatcttgctctgtcccccaggctggagtgcagtggcaccatctcggctcactgcaacctctgcctcccgggttcaagcgattctcctgccttagcctcccgagtagctgggattataggcatgtgtcaccacgcctggctaatttttgtctttttggtaaagactgggttttgccatgttggccaggctgttctcgaactcctgacctcaggtgatctacccgcctcggcctcccagagtgctgggattacaggtgtgagccaccacgccctgcctggcggatttttattttcttccttagatctgcttttctgtgtcctctccacgtgctcccacgctcttcgtggtggtgggtgctgggtgggcagggctgacctccctccatcctttcatcagaggttagaagcaacatctgtatttcccagacacctcagcagctgggattctggatgagaattcggtgccaacaattagagacaccctgtgaggcgtggacggcaggagtgatcccggaattgcagctggacctggcgtccttgaaccgagcagttccagcagcggaactggagacagcagtgcccctgctgggtcagttcagtgctgtcctgggtgtcatttctgagggcttggcctagagctgctgcttccgcttcccatgattttttttttttttgagacggagtcttgctctgtcacccaggctggagtgcagtggcgtgatctcagctcactgcaagctctgcttccctggttcacgccattctgcctcagcctcccgagtagctgggaccacaggcgcccgccaccgtgcccggctaattttttcaattttttttagtagagacagggttttactgtgttagccaggatggtctcgatttcctgacctcgtgatccgcccgcctcggcctcccaaaatgctgggattacaggtgtgagccaccgcgcccggccagcttcccatgattttgtaagcactcaattccctgtaagatacctggagtggtttctatttaggtgctagagacaatcatgcattacagttttttttttttttttttttttttttttttttggagacagggtcttgctctgttgcccaggctggagtgcagtggtgcgatcatggttcactgcaagctccacctccccaggctctggtgatccccccacctcagccccccaagtagctgggaccacaggtgcatgccattatgcctggctaatttttgttattttagtggagatggggtctccccatgttgcccaggctggtctcaaactcctagactcaagtgatcctcttgcctcagcctcccaaggaccgaattaaaggcatgagccatcttgctcagactcct[133 bp omitted]aaccctgcctctattaaaaatacaaaaattagctggacgtggtggtgggcgcccgtaatcccagctgctcaggaggctgaggcaggagaatcacttgaacgcgggaggcagaggttgcagtgagctgagatcccaccactgcactccagcctgggggacagagcgagactctgtctcaaaaaagaaaaaagaaaaaaaaaaatccatgttaatgggtagacacaactcaagtgagagtaggttttggggcagagaaattcagatgaggctttggctggattaggcctgagcttcccgtttggcttgtgaacggcgatgttgctgagctggcggacacaggaaccagagctctggggacctggcagggagagatgtgtggtcagcgtgtgggtttgtggcatttgaggcagtgggactgggtaggagttgcacgtagaccaaaggtgacaggtgaaaggcagggaggtctgggggaaggagaaaaaggtggggggtggggaccagcacagggcactgagcagaggtggcggggagggtgtgggagagaatcggggctgcggatgagctactccccagcctgcccacacaaggctggaaggcaccctaggagggtcagccaggaggccggggcagggtatccattgctgagaactgcccggggagggggtgttcagggctgggagcaacctcatagcaccaccatggtcctgcgtgatcaataatgcccccactccctgatcctgtgtgaccatcaaatgcagggccgcccaagttcaaggagaatctggacgtgggagacagtggccgccaggaggcgccttgagcctgtgccaggaaccagacagtctgggaggtcccaagcggccctagctctcctgtcactcctgctcaggatccctcaaggggtcacactgcagcaggcagggtgacagctagaccctgggagggccagcgggttagtgctgctttctgaatgggcaggagcaggtccatggagaccgcttcctaggtctgtccagggggccttctggaggtctaggggctgtggcttgggggtcagttggtgagacttgagtggctcacactggttacaaaggcctccacactggccctgaccgggactgcggcccactggagttggggagcgggagccagcaggggttcctgacctggagagtgggagacggggggtttaaggtagagggtgagcaggagggaagggtgtggattctggcagtgggcctggaggcggacaggggtccctggccattagggccatgtgtctgccatggtgggggcagggcgagaagttgctgagacagatctgtcaaacccttgccgcttttcagtgagcaagggtgtcaggcttcacccctaacaaccacccacctgtcttttctcccattgccagtctgggaccttacctagaacccctaggggctgaaggaatgtttccccctccagggacagaatttcagggtgtcacatacccaaagctgtggtggtctaggattccacatagaggttctgggcttccagtcctgtgagtcaccagaggtagtagggaacctaaggaaggagagacgagagatagagggagacagactcagggagatgacgtcagaacatctggatccagctgtgcctgaagccctcccttaggcttttccattacacgagcgaagtgcttaagccagtcacaactcggcttcagacacttatgagcagaacttacctgaaacatgccctgatgtcccctcccccatctcagctgctttccccaggcttcgcttctgcccctgtcactggcgggagtccatccaaaccttgagtctggcgttcaagtctggccgcctcacccctcctcttgttggcacatcagccttgggcccctctccctggcccactgggttcctgcccctttgtcctcaagcccctctactccagaaagtcagcctgaattgcacccttctccccaccccacccacgtgaagtagaatcaagagcaataccgggctccccacctaaaagctggggggttggtttcaagtcttctcagtccgattattcccatctgaactccatgaacagggaactacagcttctcctctgacatcctaaacatctttaactattaggggtcatgtgaaccttgtatgcagaaggtgcttaatcaacgcctgctgatgcaggtgatacagggcattggttagtagcatggactctggagccaagctcctggaatcacatcttggctccatcccttaccagctgtgtgtctttgaggaagttaacctctctgagcctcaagagagagaatactagtgtctatcgttaaatgaggtaatacctattactttatttatgctgtaaatgctgacagcagtgcccagcacattgccaagtgctgtgtgatttttactatataaggagctcagaagaaaaggaaagaaaaaggaccacaatcaattccttttctttttttttttttttttttttgagacggagtcttgctctgtcacccaggctggagtgcagtggcgtgatctctgctcactgcaatctccacctcccaggttcaagtgattctcctgcctcagcctctggagtagctgggattacaggcgcccgccaccacgcctggctaatttttctatttttagtagagacagggtttcaccctgttggccaggctggtcccaaactcttggcctcaagtgataggcccgtctcagcctcccaaagtgctgggattacaggtgtgaaccatggcacctggccagtagagtctagatttaactcccagtttatagaatatactagggacagaggagcatgttagatgacaccacagagtgaaaccagtcaaatctagacagtaggaaacccaatcaacctgctttcttcaacaaatgaatgtcatttaaaaagctgagtgattggctgggcacagaggctcacgcctgtaatcccagcactttgagaggccaaggcgggtggatcacgaggtcaggaattcaagaccagcctggccaatgtggtaaaactctgtctgtactaaaaatacaaaaattagccaggtgtggtggcatgtgcctgtagtcccagctatttgggaggctgagggaggctgaggcagaagaattacttgaacccgggcagcagaggttgcagtgagccaagatcatgccactgcactccagcctgggtgacagagcgagactctgtctccaaaaaaacaaccaaccaaaaaactgagtgattacttccacgtcaagacacagatattgaggagggtagaaggcactgccgtgactagactggaatccaggccatctgaagccccaggtgggcagagatgctctggttacctggacatcctgaattccagaattccagcaggtgtctacttagggctgccacctccttgcagttgatttttggagcctcttgttgcctctggcttgaaggcccagctgtctttctaggtgttttcccagtgggcatggagctgcagcgtggctgctgggagcagcactatgtctccctgcccactagctggagctccagctagatgtgaaccaccaggcaggcgcagttgctgctggtgtccagggagcattgaacagcaggagggactgagggtagtaggagagaggagaaagaaggtgggtgtgaaggacaggatgtcatatcagtggtcttccttctgggaggaaacctcacctggctagactcctgtccactcacctacttgcccatcaacccatttatccacccaactgcccacccatctgtccactcatccatccatccatttattcatccatccatccatccatccacttattcatccagccactcataatccactattcatccactcatccattcactaatccactcatccatccatccatttattcattcatccatccatccactcatccatccatccatgggcaaccatcatcaatggctgctaaaaccatttggtttaggccgggcatggtggctcacgcttgtaatcccagcactttgggaggctgaggcgggcagatcacttgaggtcaggagtttgagaccagcctaacatggtgaaaccccatctctactaaaaatacaaaaattagccgggcgtagtagcgggcacctgtaatcccagctactcgggaggctgagacgggagaatcgcttgaacccgggaggcggaagttgcagtgagctgagatcacgccattgcactccagcctgggcaacagagcgagactccgtctcaaaaaaaaaaaaaatcattaggtttagcatccactcatccatccatccatccatccatccatccatccatccacccactcatccatccaattattcatgcactcatccacttgtgcatccgttgatccatccatcaatcatccatccatccatccatcatctatccatccatccatcatccatccatcaatcatccatccatcatccatccatccatccatccatccatccatccatcatccatccatccatccatccatccatccatcatccatccatccacccgccatagacataatgtcaagggaaagaatccagacataaagagtacacagtatgtgattacgtttatatgaagtttgagaacaggccaaactgatctatggtgaaataagtcaggccagtggtgacccttatgagggaattaactgggaggatgtgtgagaaaaacttggggaactggaaatgatccatatcttgatctggggtggttaaatgatattatacatatggaaaatttgctgatctgtacatctgaagatttatgtaaaaaatatatttttaaaagaaaaaagacctcactgagaaggtggcatttgaggaagtcacctgcactgcagaatgctcccagacacctgcagataccgtatacctttgtgtagccagcacacaaataacgggatggctactttgagtaccgtattgaccagaataaattataccagattcccgcctcgcaccgtatgcatttgtattgtggtacaatacaaatttcagtgtgcctatgttcctggcaaactgaagaggcctgacgggaactcagtgggtctttggaaaattctgcacccagtggaagaagagcctataagccctacttaaaaaaaaattttaaatctgaaatatgccttttccctttaaggaggtacaaaggcttatttgagcaggaaattaaacagacaccccctccccaccaacatgcctgaattccaagcacctggtgctggcccagagagagagaggggagttatcgcagggagagtgagataagaatttccttggttggtgctaacaaatgaccgagtttgctttcctgtttcacatacggtttttacatgatttaattgttttaaatgtttgtgaacattcagataagtgccatgtggtttttttgttgttgttgttgagacagaatctcgctctgtcacccgggctggagtgcagtggcgcgatctcgactcactgaaacctccgcctctcaggttcaagcaattcttctgcctcagcctcgccttgtggttttatagatggtttttgtgaaaat[135 bp omitted]aacctccgccttcgggttcaagccattctcgtgcctcagcttccctagtagctgggattacaggcatacaccgccacgcctagctaatttttgtatttttagtagagacagggtttcaccatgttggccaggctggtctcgaactcctgacctcaggtgatccacccaccttagtctcccaaagtgctgggattacaggcctgaaccactgcattcagccaacagtaaacttactaaatattttcctaaagatgcatttatctgacaaggatttgagtgcttgtcacgtgccactcactgtttagtttctgggcacataccaggaaagagaaccaaaaagaaaaactcgaggtgcacattccagtagggagagatggaacagaacatgaaaaaatcatgcttaggctgggcgtggtggctcatgcctgtaattccagcattttgggaggccagggctggtggatcacgtgagcccaggaatttcacgctggcctgggcaacatagtgagactccatctttgtgaaaaaaatacaaaaattagccaggcatggtgatgtgcacctgtagtctcagctacctgggaggctgagttggaaggatcacctgagcccaggaggtcgaggttgcagtgagccatgatcatgcgactgtactccagtctgggcaacagagcaagactctgtctcaaaaaaaaaaaaccaaaatcattattggtaagatacatagaatgtcagaggtgacgagggccatgaggaagagggggcacagaatgttgggggaggggttgcagttttaaataggatgtcaggggaggtcacagtgaaaagtgacattttggccaggcatggtggctcaggcctgtaatcccagcacttggtgggaggctgaggcgggcagatcatctgaggtcaggagttcgagaccagcctggccaacatggtgaaaccccgtctctacttttataaaaattagctgagtgtggtggcaggcacctgtaatcccagatactaaggaggctgaggcaggagaatcgcttgaacccgggaggcggaggttgcagtgagctgagattgtgccactacactccagccttgttgtccagcactccaggcaacaagagcaaaactccatctcaaaaaaaaaaaaaaaagaaagaaaaagaaaagaaaagaaaagtgacatttgagcaaagatatgaaggaagcgaggagagaaactggcaattatctgaaggaaaactgttccaggcagagggcacagtaaatgcaaaaactgtgaggtggatacgtgctacaa[212 bp omitted]gaggcaggagaatcacttgaacccaggaggcggaggttgcagtgagctgagatcgcaccactgcactccagcctgggcgacagagtgagactccatctcaaaacaacaacaacaaaaaacccaaaaacgttatgctaagtcagatacaaaaggtcacctgttgtacgagtccatttatgtgaaatatccaaaacaggcaaatcctttaaggcaaaaagcagattcatggagccagggactcctggggagatgagaagtggaaaggggctgcttgatgaatacggggcaacgtctagggtgaagaagatatcttggagctagacaggagtgatggctgcaaaacagtgtcaatgcacaaaatatccctaatggtacattttagcttacgtgtatcgtttgtatcgtttatttatttatttattttgagatggagtcttgctctgtcacccaggctggagtgcagtggcgtgatctcggctcactgcaacctctgcctcccaggttcaagtgattctcctgcctt[134 bp omitted]cggcctcccaaagtgttgggattacaggtgtgagtcacgccgcgcccagcctaggaatatattttgaaagtagatccaccgtaactggccgaggtacaaggggaataaaaaagagccaaaggtgactccaaggtttctggacttggtctagagttgccattgcctgagatggggaagactgaggaaggaggggctcagaggtggggcaggtgcaggggagaaatgggaactcgtgattgagatgcccattagacgcccgagtatagatgtgaagtaggcagttggaggtaaaaatttggaattcagagaaaattcctgggctggaaatatgcatttggaatttgcttatattcacaacctttaaaacgttgggagtgtgccttgtgtcttcaacctgtgaaaactgcccattctctccctacctaatgtagtagaatttttttgtttgtttgttttttatttttgagacaagagtctcactctgttgcccaggttagagtgcagtgatgcaatcttggctcactgcaacctctgcctcccgggttcaagcgattctcctgcctc[215 bp omitted]cttttgtatagctgtgtggctgaataaaggtgtttgatgtgttgtgtctctgggttgggtttgtctggatgtgcaattgtgtaaatgggtgaaggagatcacttgtgtgttaccatttgtcatgtgtgtgtttgtgtgtgtgaaagagagagaaaaggggagggggatggcctcccagcccagaagtcattactaattcctccagcatcccccacttctgggcaacagaggcccttttgttcacagtggcagaggcagtgatgtcccttctctcttgaggcccctggcaagttctcagccctgagcctggtcaacaaaaggtcctgtgagcttttgcattgagcccggccacttgcagagtgtgctgaggacatcagtgagggcacgggacctgtgacaaccacagtggcttggccagcgatggaggagccaggggcttagagagggccttcttgaggataatgttgttacaagataattatgggaaaaaagggaaaaccatgactgtcctacagatctaaaaatgaacacatggggcggacatgatggctcgtgcctgtaatcagcattctgggaggccgaggtaggagggttgcatgagcccaagagtttgagaccagcctgggcaacatagtgagacctcatatctattcttatttttatttatttttagttttcattttttcttgagatggagtctccctctgtcacccaggctggagtgcagtggcatgatctcagctcactgcaacctctgcctcctgggttcaagcgattctcgagcctcagcctcctgagtagctgggacaacagacatgcaccactaggtccggctaattttttttttttttttttttttttagttttagtagagatggggttttgccatgttaccaggctggtcttgaactcctggcctcgagtgatttgcccgccttggccttctgaagtgctgggattacaggcgtgagccaccacgcctggctccatctctattttttttttttttttttttgagacggagtctcgctctgtcacccaggctagaatgcagtggcgcgatctctgctcactgcaggctccacctcccgggctgacgccgttctccggcctcagcctccggagtaactgggactacaggtgcccgctaccatgcctggctaatttttgtattttcagtagagacgaggattcacc[140 bp omitted]ttggcatattgaagtcttaacccaccgtactttagaatgtgaccttacctggaagtagggtcgttgcagatataatcagttggggtcatactggagtaggatggtccctaaaccatcatgactggtgtccttaaaaaattcggaaatttgagcctggagaggtagctcatgcctgtaatctctgctcttggggaggccgagacaggaacatcacttaagcccaggagtttgagagcagcctggacaacatagcaagaccttgtctctacaaaatattttaaaaaattggctggggccgggcccggttctcaaagcctgtaattccagcactttgggaggccgaggtgagcagatcacttgaggtctggagttggagaccagtgtggccaacatgatgaaagcctgtctctactaaaaatacaaaaattagctgggcatggtggcgcatgcctgtagctccagcttgggaggctgaggcaggagaattgcttgaacctgggaggcagaggttgcagtgagccgagattgtgccactgcactccagcctgggcaacagagtgagactccgtctcaaaaaacaaacaaacaaacaaacaaaaaaatatatatggtatgtatatatttattttgtatatatatttttgtgtatatacatatctatatatataatttgtatttatagagatggggtctcactatgttgcccaggcagaggtttgagtttttgttgagggctctgggagtcacagaagatagctctatttgtgggtcattcactttttgcccagccctgtgttgctttacatgcacttgctcattaaatcctcccaagatcagggggatcagactgaggtgggtggagtcgacttgaactttgcttagggttctaagaggtaaagactaggggatctggggacagggaaatcccagatagagttaacctttttttttttttttttttttttttgatacagtctcgctctgtcgcccaggctggagcgcagtggtgcaatctcagctcactgccttctgtctcctgggttcaagtgattctcctgcctcagcctcccaagtagctgggattacaggcgtgcaccaccacattgggataatttttgtatttttagtagagacagggtttc[132 bp omitted]tcagagctctagttcttcctacctgtataaactcgcttactgctcacatcaaccatctaatggaagtgctgttttcatgttgtttcctgccctttgtctctacctgccagatcactcccatgaaggaagggactttgtttatttattcattgctgtatccctggaaactgggactgcaggtggttatgaagtacctatttgttaaatgagtgaacatttcctgtaggcaattacacccaacttccaaatggagaaacaggctcagagataagcccctgcaccctcactcctcaactcaactgcctgtttctagcactttccatgacgatcccctctgcacggagagggttcatggggagtgactattgttctgtaatgaatgaccaggctgtgccaggtccggcagtaggccttttccttttccttttttttttttttttgagatggagttgagttttgctcttgtcgcccaaacaggagtgcaatggcgtgatcttggctcactgcaacctgtacctcctgggttcaagtgattctcctgcctcagcctcccgaagagctgggactacaggcatgcgccaccacgcctggctaattttcatatttttagtagcgacggggttttgccatgttgtccaggctggtctcgaactcctgacttcaggtgatccacccaccctggcctcccaaagtgctgggatttcaggtgtgacccactgtgcctggccaggccttttcctttctttcttttttcgagacagtgtcttactctgttgtccaggctggggtggcagtggcacaatcacggctcactgcagccccaaactcctgggctaaagtgatccttccacctcagcctccccagtaactgggagtacaggtacatgccaccacacggactaattttaaaagtttttgtagagatggggtcttgctatgttgccccagctggtctcagactcttgggctcaagcagtcctcctgcctcggcctcccaaagcattgggattacaggtatgtgccaccgtgcccagccgcagcaggccttttgtttttttagagagggtcttgcttggtggcctaagctggagtgcagtggtgcaatcacggctcacagcagcttccaaactcctgcgctcaagcgagcctcctgcctaagcctctcaagtagcctgggactgtaggcacacaccaccacgcccggctgatttattatctatttatttatttgaggtggagcctcgctctgtcacccaggctggagtgcattggcctgatcttggctcactgcaacctccgcctcccaggttcaagtaattctcctgcctcagccttccgagtagctgggactacaggcacgcgccaccacgcccatctaatttttgtatttttaatagagacggggttcctccatgttggccaggctggtcttgaactcctgacctcaagtgatccgcccgcctcggccttccaaagtgttgggattacaggcgtgagccaacgcacccagccactaatgtattattattattattctgtagagacgcagtctggctatgttgcccaggctggtcttgaattcctgcctctgcctcccaaagcgctggggttacaggcgtgagccaccgcgccctgcggctgcaggtctttataaggcaactgtgggccctggaccgctccctgaaaacctccccctcaactccctgtctcctccctcacctggtctaccccgaatccttcccctctcgccccctcgccctctccaggggaggtgagggactcaagaatcgcgccctgcttctgtccccaccgcgccgtccccaagcccacgcagtgaaaagaccacccttgaggctgattccgggtccagctgggagcggccagccgtaaatcaccgcccccgtgggccgtaccattctggccggggggacctgggaggggacgcgcggagggcttcccccggggactgcctgtatcgagactctctccagcccaacaggaggatgggaaggagacttgtgtgggggcctcgggctggcgggtcgcgggttccttatcctccgccttggcgcctctccgcccaccgcccaccgcccctccctggcattggttggcgccaggggaagccgaggctccatcctttctgcgcaggttcccgccgcactcgcgcagacctagcgcgtccaggtgggaggttagtgtggcccgggcgtccgctcctcagcggatgtggcagccccgagccatggctctcgccgtccgagtcgtttattggtaagcccagcggccagcggcccccgtccccgacccccgccgggacccgattctcggagccggggtcagggagccccggggagaggacccatgggagcccttgtatgggaaaagggagcccctgtatgtgggtggggtgggcgtacggaggggcgaaaaacagagggcggtcgtccctaggccccgtcttcgacttgtgacacgctgggcatctcgggttataaaaggtggggctgagacgagtgtgtgtcaatttcgaacccccgactccggggctccgctggggaaggggctgggggtcagctttgtaaagggacctaaggctcctccaccctaaggcttcccctcccccaatatcccgaacagtcgcggggtggggacagtgagagcccagaaggttcgagaatgtctcagcctgtgtttcagaagcacttgaattgttggcctctgcccagtgggttcccttggccacgaaccccactccttttctggcctcagttttccgtctgtggcaagagggaggctctgtgtcaataccgaacacgcttaatttctgcaagtctcaggaagggtataataggataggatataaattacgttctctccactccccagcacctaatactgtgtggcatgctgtaggtatttaataaatacgtgttcaatgaatttatcctcccaggaatcccttaagagaggggaattttaggccaggtgccgttgatcacgcctgtaatccaaacactgggaggctgaggcgggtggatcgcttgagcccaagagttcgagaccagcctgggcaacccagggagacccccccctcgtctctacagaaacttaaaaagttagccgggcatggtggcgcactcctgtagtcgcagctgcttgggaggctgaggcaggaggatcactggagcccggaaggcggaagttgcagtgagctgaaatcgtgccactgcactccatcctggacagcagagcgagactctgtctcaaaaaaaaaaagtaaattaaagagaggaattttagttctatgttacaggtgagaaaactgaggctgggactggggtgggggcaggtcagtagcttcaagtctggactgcaggtgacaggggtaactggaacctgggtttgtcggcagctttccaacgtctctgcctgctcgacaaagcagaggcaagagtgacattttgagacgcctaccaggcctgtacaccagattccagtcccgaaatagcctgctgtgggggttgggtgagcctgtatttcaccctggggactgggaaggtgttcagaatctaggagctgcggggccgggtgcggtggctcctgcctgtaatctcagcactttgggaggctggggcgggccgatcccctgaggttaggagttcgagaccagcctggccaacatggtgaaaatacaaaaattagctgggcgtggtgtaagaatccaggagccgcagggttttccttggagtgctgcgagggctgtgggtgagggtggtgggcacagggagtgggtggggaccttacgtgtgctgttcttctcctaatccagttctcctggttttcccccgtccccgtctctcgtatttgtggtctccttgtctcctctctcccctttttcccctcccccttctctgtctcttgcttggtgttggttttctgtgtgtctctgtgtgtccccgcgccaccccctgtgctgtgtcccaaaactctgcctggctggtgcctgtcttctctcttgagggcatctgtcacctcttctgcttggtcatctgtgttcctctttatttcttcctggccccatcttgctctctccccacaccgcctgtgtctaccctcctctccccgatcccccacttctccctctctcccctgggccccaatgtcttggactctcctaccagtggcgcttgaggctacaagtccaaggtaagcagagtggatgcccggggggcattcctgggagctggggaggggtagagtgcatattgggagggggctgactggtatgacccctgctgtgacctctcaccgcgttttcagtatcttcagctcaagaagaagttagaagatgagttccccggccgcctggacatcgtgagtcttgggatggggagaaagacttgagcacagccactgtgtcggtccgttaggcctggatggcactgcaggggggttaggtcagccctacgcccttcacccatgttctcatccccctgggaaggggagggtctccccaagaggacatcttagcccctccaacatctcccctaccccctttcctcagtgcggcgagggaactccccaggccaccgggttctttgaagtgatggtagccgggaagttgattcactctaagaaggtatgtctgtctgtccgtcctgcctggttttggggctagcatggggttggggctgaggttggtgtctcggtcccagctcaccccttccctcttcctcccctccctagaaaggcgatggctacgtggacacagaaagcaagtttctgaagttggtggccgccatcaaagccgccttggctcagggctaatgcgccctgaaggcagaggtgagggggcccactagacagggacaccaccctttggatcttctccctgccccatgctctgactccttggcccagggtggagagcctgggagatgggggggacatcacgtgtgtccccagagcgagcgggataaagttagacccggttggtggaggacaacaactgagatggggtcagaggtgtgcagggtgacagctgagatggtgatgggtcagagatatgcaggatgacagctgagatggggtcaaaggtatgcaggatgacagctgagatggtgatgggtcagaggtgtgcaggatgacagctgagatggtgatgggtcaaaggtatgcaggatgacggctgagatggtgatgggtcagaggtgtgcaggatgacggctgagatgctgatgagtcagaggtgtgcaggatgatggctgagatggtgatgggtcagaggtgtgcaggatgacggctgagatggtgatgggtcagagatgtgcaggatgacagctgagatggggtcagaggtgtgcaggatgacagctgagatagggtcagaggtatgcaggatgacagctgagatggggtatgcaagatgacagctgagttggtggtggggtcagagggctgccctaaaacagctctcctggtttgggaatgaaaagtgctagcaacccaacggttcagaatccggaactctaggtctttgtcccattgccaagaaacagttcccaacccagcaggtcatgtgacagcgtccggccaagttcccagcatgttttgagacagaatttccttgctccacaatttcgagtaggtcactaattatcaccgggctctgaacctgagaattagttctaggaatattccagacctgatccagctccagaaacttacccactttggaactgaacatgagtccaagaatgctctagaaacaaatgctaactctagaatggattgtctgctccaaaaaaaccctagagctgactcccagttctccccatagagccgagaatgaaatacaccaccagctcccaacacactgtaaacctgagccccccttcccaacccagcaattgaaaaatgtgaaccagctcctaagcactagaattgaccactagttcctggagttggctactggttccttatcactgtttttctttctttctttcttttttttttgagatggagtcttgctctgtctcccgggctggagtgcagtggcgcgatctcggctcactgcagcctctgcctcccgagttcaagcaattctcctgtgtcagcctcccaagtagctgggattacaggcacatgccactatgcccggctaatttttgtatttttagtaggtctgatcctgttggccaggctggtcttcaggtgatccacctgccttggccttccaaagtgttgggattacaggcgtgagccaccgtgcttggcctccttaagcactctgaaccaagtattgtttccagcctaatacattgtggaacaagtggcaatttctatatgaacctcaggaacaaagaactactttccagcaccttctgagtctgattttccagtttgtaagccagtatggtccagataagcgtgaaacccaacccattctagaacagttactagccctttttctggtctctggcactgcagggcctggagcatagtttattttttgaggtggagtctcgctctgtcgcccaggctggagtacagtagtgtgatctcggctcactgcaacatctgcctcctgggttcaagggattcttgtgtctcagcctcgtgagtagctggaattacagatgtctgccaccatgctgggcaaatttttttttttttttctaagacggagtctctgtcgcccaggctggagtgcagtggcgtgatctcggctcactgcaagctccgcctcccgggttcacgccattctcctgcctcagcctcccaagtagctgggactacaagcgcctgccaccacgcctggctaattttttgtattttttagtagagacggggtttcaccgtgttagccaggctggttttgaactcttgacctcaggtgatccgcctgcttcggcctcccgaagtgctgggattataggcgtgagccactgcgcctggccatactttttactcccctctaaccttcagcaccagttcccattccatgttgatctagaacagagtatcccatcccaacacactgtggacccaagtaccagctcccagtgtgccttgtgccagaaaactagttttcaaatgcgttaaactcaagttccatttcctaaaattctttaccagagcagaatgaggtcatgttcaatgtgaattgggacgtgccaatttgaagtaatgcagaaacgatatcttgccttatgtgcaggtctgaaacaaagcaaatccctctaacataaaggaaaagaaaaatggaattgcctaattccaaagctgcatcagctgaatgcattgtgga[133 bp omitted]tcccaggctcaagcgattctcctgccacagcctcccaagtagctgggactacagttgtgcaccatcacgcccagctaatttttctagtttttgtagagatgggtttttttcaccatgttgcccagactggtctcaaactcttgggctcaagtgatccgcccgcctcagcctcacaaagtgctgggattacagacgtgagccaccacacccggctatctttcttccttttaacatgggccccacgcctggcctctgttcctgcaaactgactccctaccccaaccacctctttttctctccacagtccagggaccttgacccagcccctctcagcagacgcttcatgataggaaggactgaaaagtcttgtggacacctggtctttccctgatgttctcgtggctgctgttgggggcagagattgacgcccccggtctttgcctctgagcgggagagtctgtgtgtatgtgtcttccccggaatccacaccaccccaccctcctcctgtcccgtggtttcatcatatctctttgcataccccatgtcttccccagttgtcccctggagtttggggggacatcccgcctcaggcatccttctcaaggggaagccaagagaggcatcaggatgggtgggtttctgattgtggcaacgtttgcaaccgttcacgattcaataaatattggatgaatttaactgaatgtgcctgtgaggagtgtatcttgttttacccctgtgcctcctccctccaggaccccgtcccagaaattagcaaccacgtgttgagtgctcagtgcaccaaccctctgtagggaagcaccttactgcaatgctgaggttgttattttttaagacagtcttgctctggagtgcagtggtgcgatcccagcttactgcagtgtccctctcctgggttcaagtgattctcccgtctcagcttcccgagtagctaggaccacaagtgtgaactgctatgcctggctaatctttttctttttctttttctttcttttttttttttttttttgagacggagtcttgttctgtcgcccaggctggagtgcagtggtgcgatcttggctcactgcaacctccgcctcccggttccagcgattctcctgcctcagcctcccatgtaactggaattacagatgcccgccaccacacccagctaattttttgtatttttagtagcgatggggtttcaccatgttggccagactggtctcaaactcctgaccttgtgaccctcccgcctcggcctcccaaagtgctgggactacaggtatgagccaccgcgccggacgtaatttttggattttgtaatagagacagggtttcaccatgttggccaggctcgtcttgaactcctgacctcaggggatcctcccgccttggcctcccaaagtgctgggattataggcgtgagccaccatgcccggctgtttttgtaactattgatagccatgaagtgcatggacactttcctcaaatcaggtacaattctaaactgtttcactctcaaaccttgacccactcattctgggaggacagaaataaaattgttcctcccccaagtcaaatgctgcgactcctgaaacccaccacattccatggatctctgctcagtgacatctgggaaacacaagacagccatcaacaatagcaacaagaggccgggtgcagtggctcacgcttgtaatccggcactttgggaggccaaggtgagcagattgcttgaggccaagagttcaagaccagcctgggcaacatggtgaaaccccacctctactaaaattagcccaagtgtggtggcaggtgcctgtaatcccagctactcgccacctgccactaggttgagaaccgcttcaacctgggaagcagaggttgcagtgagctgagatcgtgccactgcactccagcctgggcgacacactgagacactgtctcaaaaaacaaaaaaaccccaaaccaaatgaacaatagcaacaagaaacaagcccccacatggcttcatttctaatgattctgaggattttcttagtatgacagtcctttggtggtatagttctttattttttttctaagacaggttctctgtcacccaggctagaatgctgtggtaggatcatggctcactgcagcctcgacctcctgggctcaagtgatcctcctgcttcagcctcctgtgtatctggaatcacaggcacatgccatcatgcctggctcttttttttttttttttttagagatggggtcttgctattttgcccaggtggtctcaaactcctggcctcaagtgatcctcctcctttggcctcccaaaatgctgggattacaggcgtgagccacggagcctggcctggtggtgtagttcttttttttttttttttttgagatggagtctcgctgtgtcgctgaggctggagtgtagtggcgcgatcttagctcactgcaacctccacctccctggttcaagcaattcccctgcctcagctcctgagtagctgggattacaggcatatgtcaccacgcctggctaattttgtgtgtgtgtgtgtgtgtgtgtgtgttttgtttttcttttttcaagtagagatggggtttcaccatgttggccagactggtctcaaactcctgacctcaggcgatccccccgcctcggcctcctaaagtgttggaattacaggcgtgagccaccgcaccgggccctggtggtgtagttctaagctaggtagagagagatcacagagagtggcatctgaacatctgagactcaatggaggttgaccgtaatcccatttgccaactggtctcacatttggggtcagcccagtatcaacatcctcagctgtcagcactccacctgttagccaaggcacactgtggcacccattcatcatttaaatgacacaagacttttcagttctttgtttaagcaagaattctggcagggctgggctaggttggcttatgcttcagtgggaacctaaatctaaacgaacctaaagcagaacgaacctaaatctccatggatgaacacagcacatgcaaagccctctccagagcaacagttctcctgcttctagtcaggaatctagcgcaatgttgtccaatagaactttctgcacgatggaatttttctctttttttgtttttttgagatggagtttcactcttgttgcccaggctggagtgcaatggtgggaccttggctcactgcaacctctacctcctgggttcaagcaattgttctgcctcagtctcccaagtagctgagattacaggcgcctgcctgtagctaccatgcctggctaattttttttttaatgtatttttagtagagatggggttttaccacgttggccaggttggtctcaaacgcctaacctcaggtggtccacccacctcggcctcccaaagtggtgggattacaggcgtgagccaccgtgccggctagcatgatggaatttttccatatctgccctgcccaacaccatagcaactgacttcatgttactggtgacaacttgaaatgtgacacgaccaaggaactgaatgattatatttggccgggcgcagtggctcacgcctggaatcccagcactttgggaggctaagctgggaggatcacttgagccctggagtttgagaccagcctgggcaacatagtgagaacctgtctctacaaaaaatacaaaaaacagctgggcatggtggtgcatgcctgtaatctcagcttcttgggaggctgaggtgggaggattgcttgagcccgggaggtcgaggctgcagtgatctgtgatggcaccactgcactccagcctgggcgacagagtgagtgcctgtctcaaaaaaaaaaaaaaaaagaaaaataacattcaacccatgtaatatgtggctagttgttatcggactgtgcaattctgttattctgttgctgcacctggccccaaagcagctttagtagacagagcggagacagcgtaggcaatcttgcattggcttttcttttctcttttctttcatttttttttttgagacagagtcttgctctgttgcccaggctggagtccagtggcatgatcttggttctctgcaacctccacctccggggttcaagcgattctcttgcctcagcctcctgaccaggtgggactacaggcgcacgtcaccacgcccagctaatttttgtatttttagtagagacgaggtttcaccgtgttggccaggctggtctcaaagtcttgacctggtgatccaccctccttggcctcccaaagtgctggattacagatgtgagccactgttcccggcctgcttttcttttttttaaagagacgaaggtatcgctgtgtcgcccaggctggagtgttagtggcatgatcacggttcactgcagcctggaagtcctgggctcaagcgatcttgccacctcagcctccgtagtagctgggactacaagcgcaccaccacttccagctaatttattttttttcattttgttggggaactgggcgaggatggggcagggtgggaggccttgctatgttgctcaggctggtctcgaacctggcctcaagcgatctttcccgcttcggccttcagagcaggcattggctgctaaaagcatcagccaggaagtgatgcgtatcagctttcgtcacagcccattggccagaaccagttacgcagccccgcccactttgagaacccctaccacgaaacccctgcctacctgcagaacttggctggggaacttagtcttcctgtgtttaggaaagggatgagaacttgaaaacttggtgagcactacaaatatctaccagggctcttattttaatcgtaccgtatgcatgaaaacgccagcatcggattttggcgtaatcaagacaattcacaccttcaaagaattcagcctgaccatcacccagcctgaaaaggggagacaccgtgaattcctttctaacagcgacagcatgtggccgcgtctgagaactgcatcttctcagttcacctcggatcaccgcggaagaccaggaatcactgtggaatccctgtgggtcaccaggaatcacttccggtcatctagattttagggtagtcaagtgaatcaccatctttgaattggtgacatgacactttctttttaaaacttaaaaattaaaatttagccgtgcgcggtggcttacgcctgtaatcccagcgctttgggaggccgaagagggcggatcacgaggtcaagagatctagaccagtctggccaacatggtgaaaccccgtctctactaaaaatgcaaaaatgagccgggcgtcgtagctcccagctactcgggaggctgaggcaggagaatcgcttgaagtcgggaggcggaggttgtagtgagctgagatcgcgccactgcactccagcctgggtgagagtgaaaaaaaaaaaaaaaattaaaatttttctaggtacatagtaggtgtatatatttatgggggacatgggctattttgatacaggcatccaatgcatactaataacatcagggtaaatgagttatctatcccctcaagcatttaacttttgtgttacaaataatccaattaaactctttttttttcttttttctttttttgagacggagtcttgctctgtcccccatgctggagtgcagtggcaagatctcggctcaccgcaacctccgcctcctgggttcaagcgattctcctgcctcagcctcccgagtagctgggattacaggcatgcgccaccacgcccggctaatttttgtatttttagtagagatggggtttcaccatgttggccaggatggtctcgatctcttgatcttgtttatccgcccgcttcggcctcccaaagtgctgggattacacgcgttaaccaccgcacttggcctttttctgtatttttagtagaggcggggtttcaccatgttggccaggctggcctcaaattcctcacctcaggtgatccacccacctcggcctcccagagtgctgggattacaggtgtgagtcactgtgcccggccacacaggcgtgagccacactgcgcctggccaggagattctttttaatttagcagttttcagaatattaaattggagcctcaacaactttctctagttttttttttctctcttttttgaggaccattgtgaaccaatggactttcatgcatctgacgtctttcaattcattgcagctcttctttgtaagctcaagttgttcagcctttggtttcttttcttttcttttaaaaaatattattatagaaacggggtcttgctatgttgcctggctggtctcgaattcctgggctccggcgatttgcccgcttcgacctcccaaagcaggaggggcttttgttttatccaagctctctgtccccgccccctcccccagtagcctgtcgggtgtctcctgcctccaaatcggatctaattctctctctgctctgctgagactggccctggcttaagaggactggaacacttgctacatgggaccaggacagggtcagagaaccagcgccggggagacccaagggccaggattgccaccagggggcagcagagaggcagagtagcagaaggaagaggtgggggtgcttccatctgacggcgggcagtgggagggcggggtggtggatgaggaggggatggtatagagggaacagtcctcccacccccaccagagtgggttaacagtacttacatggtcactggatgcgtattgaagaatgagcccgggctcagtgattcacgcctgtaatctcaacactgggaggttgaaatgggagggtctctggaggtcaggagttcgagaccagcctgggcaatgtgaaaaaaccccgttcctaccaaaaatacaaaagattagccaggcgtggtggcacgcgcctgtggtcccagccactcgggaggctgaggtgggaggatcccttgagcccaggaggtggaggttacagtgagctgagatcacacccattgcactccagcctgggcgacagagtgagaccctgactcaaaaaacaaacaaacag[138 bp omitted]atggtgaaaccccgactctactaaaaacacaaaaatggcatggtggtacgtgcctgtattcccagctacttgggaggctgaggcaggagaattgcttgaaactgggaggcagaggttgcactgagctgagatcgcatcactgcactctagcccctgggtgacagagagacttcatcccaaaaaaaaaaaaaaaaagagagagactgacagaaaaagaccaagaacattctgtatgtgatgctattattagctataataatggcagatatggtttgttgatcactgaccataatcagtgttaagatttacatgatttgactcatctaacccttctccaaaccctccctttcaccaaaaaatctttcatattaaaaattcacagttttttttttttttgagatggagtctcactctgtcacctaggctggagtgcagtggcatgatttcggctcactgcaacttctgcctcctgggttcgagagattctcctgcctcagcaccccaagtagctgagactacaggcacgcaccaccacactcagctaattttttattttatatttatttatttttattttattttatttttttgagatggagttccgctcttgctgcccaggttggagtgcaatggcgcgatttctgctcactgcaacctctgcctcccaggttcaagcaattctcctgcctcagcttcccgagtagctggggttacaggcatgtgtcactacgcccagctgattttgtatttttagtagagacggggt[135 bp omitted]ttaaagatagatgctttctttacattagataaaacacacttgtcttaagtgttcagtataattgctttgataaatgtatgcaactgtctgggtgcggtggctcatgcctgtaatcccaacactttgggaggctgaggcaagagtatcacttgaacccgagagttcaagagcatcctgggcaacatagcaagaccctgtctctacaaaaaataaaaaaaaattggctgggcatggtggtgtgcacctgtagtcttagctacttgggaggctgaggtggaaggatcacttgagcctgagagcttaaggctgcggtaagccatgtttgtgccactgcactccagcctgggtgacacagtgagacccgtctcaaaaaaggatcaacaacaacaaagtatacaactatgataccagcacccaaacaagaagcatccatcagcccccaaatttccctgggacctttttgcagtcattttatattcattctcacacctgcctgggcaaccaccaatctgctttctctaactatagattacttctgtctcttctagaatttcatataaatgaaatagtatcatatagagctttctgtaactacagattatttccatatcttctagaatttcatagaaatgaaattgcatcacatacaacctcttgtgtctggcttttttcacccaacataaatgattttgagattcttccatatcacatgtgtatccacagcttgttccttttcagtgctgtgttatagtccattgtatggacataccataatttgcttaaccattcacttgggctgtttctattttggtcttttatgaataaagttgttatgaatattcttgtacaagtcttcctgtggacatatgtttatttcttatttattatttttctcgagacagggtcttgctttgtcactgaggctggacacaaggcttgctgtgtccttgtcctgggctctagtgatcctcccatctcagcctcctaagtagctggaattacaagtgtgtaccatcatgctcagttaattttaatatttttatagagatggggtctcattatattgcccagactggtctcaagcagtcctcctgcctcagcctcccaaagttttttttttgagacggagtcttgctctgtcaccaggctggagtgcagtggcatgatcttggctcactgcaacctccacctcctgggttcaagcaattctcctgcctcagcctcccaagtagctgggactacaggcatgcaccactacacccagctaatttttgtatttttagtagagatgaggtttcaccatgttggctaggatggtctcgatctcttgaccttgtgatccactcgcctcggcctcccaaagtgctgggatttcaggcgtgagccactgcatgtggtccattttagttttaatatgcatttccctgatgatttttgatgtcatgggcttactggcctttttgcatatctttttttttttttttttttttttttgagacgggaggctggctctgtcacccaggctggagtcagtggcacgatcttggttcactgcaacctccacctcctgggttcaaccaattctccagcctcagcctctggagtagccaccacacctaatttttgtatttttagtagagacaaggtttc[133 bp omitted]tgccatgttgcccaggtggtcttgaactcctgggctccagccatcctcctgccaaagcctctcaaagcgctggaattacaggcatgagccactgtgcacagcctggtctaagaaatccttgctcactccaagactgtaaaaatattctcctatggatgcttctagaagcttcctggttgtagcttttcatttggagtgaggtgggagtcaaggttttttttgtttttgtttttgttttttttttttttttttgagacagagttttgctcttgttgcccaggctggagtgtaatggcgtgattttggctcattgcaacctccacctcccgggttcaagtgattctcctgcctcagcctctcgggtagctgggattacagtcatgcaccaccacgcccggctaattttttagtagagatggggtttctccatgttggtcaggctggtctcgaactcctgacctcaggtgatctgcccgcctcaacctcccaaagtactgggattacaggggtgagccaccgtgcccagcccagtttatttttatttatttacttttttatggtgaaaagatatacatatattgagaattagccagctggactcagtttagatgatcccaattttgttggcaacatccaaagcattgtaaccaggagtcggttgaacatgtgacttcttctctccgtcaggccgaatcagagcttcttcacagcctgtttgatctggtgctccttggctttaacatctataatgaaggcaagtgtgttgttgtcgtctgtcttcttcatggcggactcagtggtcggcggaaacgtgatgatcgcagagtggccaagcttgtttctccagggggcgctcttctgaggatatttgggctccctccggagtcgcgctgtcttgggccgcctgaaggtgggtgacctgcggatcttctcttctgtgtggctgtggacggctttcaacactgctttcttggcctttaaagccttcggtttggcttgggctttaggagaggcaggagcttccttcgctttcggcagcatcttgtgaaaagacaaggttaattttt[137 bp omitted]cggtgaaaccctgtctctactaaaaatacaaaaaattagccgggtgtggtggcgggcacctgtagtcccagctactcgggaggctgaggcaggagaatggcgtgaacccgggaggcagaggttgcagtgagccgagatcgcgccactgtactccagcctgggcgacagagctagactctgtctcaaaaataaaaaaaaaaaataaaaaaaaataaagagggagtctctctctgtcgccaggctggagtgcagtgtcctgatctcggctcactgcaacctccgcctcccaggttcaagcaattctcctgcctc[135 bp omitted]acctcccaaactgctgggattacaggtgtgagccaccgcgcccggcccaggaccatttgttaaactccccatcctctcatcaaattgacttgatactttgttcaaaacaagttgattgcatatgtggatctatttctggattttctcttttattctactgatctctttgttgatctttatgctcataacacactttcttgactactgtagctttataataaatcttgaaattaggtagtatacgttctccagttttgttctttttcaagattatttggctattctaaatctgcatttctgtctaattttaggatcatcttatcagttttatcagaaaacttgactgagattttgattgggattgcaatgaatttataggcagatttggggagactatccatgaacatcagatgcctttctgtttatttaggtctttttttttttttctttttttttttga[131 bp omitted]caccaggcccggctgatttttttgtattttttttaagtaaagacggggtt[142 bp omitted]ataattgtggtcgtagctgtcctgcacatcctactttcttcctaggcattttataggtgtgtgtgcatgcgtgcgtgtgtgtgtgtgtgtattttgagacagggtcttgctctgttgcccaggctggagtgcagtggtgcagtgatgctgcctcaaactcctgggctcaagcaattctcctacctcagtctcccaagtagctgggactacagctgtgcactaccatgcccagctagtgttatttttaattttttttgtgtagatggagtcttgctttattttacagactggtgttgaattcctggcctcaaagtagctgggacgacagctgtgcaccaccatgcccagctagttttattttttatttttttgtgtagatggggttttgctatgttgtacaggctggtcttgaattcctggcctcaagcgatcctcctgcctcgatctcccaaagtgctgggattacaggaatgagccgccacactcagcctattttatgttttttaatgcttttgtaaatagtgtttttaaaaaacttattttccaattttttgttgctattatatagaaatataatttgtttctttttttaaaaaaaaattcccacacaacaccaagatatacaattggtttttgtttattgattttgtatcctggaaccttgccaaattcatgaattaatcccaggagtttgagtgtgtgtgtgtgtgtgtgtgtgtgtgtgtgtgtctgtgtgtgtgtttattctgtagatattttcttatgttagctacaagagttaccactttatccaagatacagttctgtaatgataaaataaaagcacttctctagcaagaaattctgagtgtacaaaagtgaataggccgggcgtggtggctcacatctgtaatcccagcacttcgggaggccaaggcaggtgaatcacttgaggtcaggagtttgagaccagcgtggccagcatgtgaaaccctgtctctactaaaaatacaaaattagccaggtgtggtggagggtgcctgtaatcccagctacttgggaggctgaggcacgagaattgcttgaacccaggaggtggaggttgcagtgagccgagatagcaccattgcactccagcctgcgtgacacagcaagaccgtctcaaaaaaagaaaaaaaaaaaaagtgaatgaatacagaactaaaaataaatttccattccatccccattcccagagctgactgcagccaaaagacagaagaaaaaagtggaagggtttactttttttttttttttttttgagatggagtctcgccctgtcacccaggctggagtgcagtggcacgatctcggctcactgcagcctctgcctccggagttcaagcgattctcctgcctcagcctcctgagtagctgggattacaggtgcccgacaccacgtccggctaatttttgtatctttagtagagatgaggtttcatcgtgttagccaggctggtctcgaactcctgacctcgtgatcggcccgcctcagcctcccaaagtgctgggattacaggcatgagccactgcgtccggccagtttacatttttcatcacatatgcagagaaaatcaggtgtgtctgcggaacatctacaacacgttccactcactgccccaatcagggagagcagattctgcagctttgttttgtcttcctgaggagtctctctggggcttatataggggaagggctccaggagaccctgacagcacctactgctgtaactgaagtctcacggccagtaaggaggcatgagaaggtgccagcacgggcttgagaagggttttgacatcatccaccaatatgtcccatctccccttcaactcttctgtgacccggctgagattctgcagatgccgcctcaccgggctctaagaggattggggcaggtggtgagttagattaggtcaaggccagggaaacctgcaagggagaaacgcagggactgagagggagggagagagactagggaaggagagggaaggggagcatgggtctgcacagggcagagagaggtaggagatgagtcggaggtgggaagagatatgggaggagggtgttgtctaaatggcagaataataagatcccccgtttcctccgagcttcctgtaagctaggctctgtgctgggcatgtcaatgacacagctccatgttgctcacaccccacacgtatggagaaggtgtagttgatacccaaagtctcatggacatccagctgtccacaggtcctcctccaaacactccaagaagcagatgagcttggtatcacttgatagagtggaggagttaagggctgtgctctttggctgggtggcctggtacatgctcagactgaatctttttggtcttctcagaaagggacttaaacaccctgatgtttggcgtaaccccccgtaggcaaagggattacaggctgccaacctcaaaggaccttttgtaaggatattagagcacataggacagctgctgtcacgtgggaagtgacacgggctggggagaccctacctgttctggttttgagggcaggaaactcccatgcctcagtttccccttttctttgcacctcactttccctctctccctccccctcagtctctcccttttcccatcgctctgcctcccttgggacagtctcagtgtggttttctgtgtacatccctctcagggtctctctgaggagcaggagcatttttcattatatcccggcagtctgtccccacctccaaccacagcctgtcacatgtttcccccaaatccgcgctaattctccctatgttttgctgaggctggcctgacttaagaggattgaagcatttgctaaatgagactgggacagggtcagagaactagctgtgggaagacacaggggccaggatggccacaaggtgatggcagaagaagcaggagaggagaggacagaggcaaagggtggcatgctattggtgcaaggatatagagaccaagaacccaatagagactttccgtagagccagtcattgtggctcacacccgtaatcccagcaatttgggaggccaaggtgggaggatcacttgaaccaggaattcaagaccagcctgggcaacatggtgagaccttgtttctgcaaaaagtaaaaggaaattagccaggcatggtggtgtgtgcctgtggtcccagctactcagaaggctgaggtgggaggatcagttgagcctgggaggttgaggttgtag[132 bp omitted]ggctagcggatcaatgaggccaggagttcaagaccaacgtagccaacatggctaaaccctgtctctactaaaaatacaaaaaattagctgggcatggtggtgcacgcctgtaaaaccagctactcaggatgctgaggcatgagaatcacttgaacctgggaggcagtggttgcagtgagctgagatgatgccattgcactccagcctgggcaacagagtgaaactgtctccaaaaaaaaaaacaaaaaataaaatacaaaaaagtttgtagatacagactcatacattaatgaacccttgatttatgacaaaatacaaaataaattgcaagcttctcaataaattgacaattagaaatccatgagaaaagaaaaatccttacctcacaccataaacagtcaattatacatgtattaaagacctaaatatgaaaggtaaaactataaaaatttagagaaaaaaatggaataccttcatcatcatgtgataatgcaagatttctttttttcctgctgtttacctgatcttggggaaagttttttttttttttttttggagatggagtctcactctgtcacccaggctggagtgcagtggcacgatctcggctcaccgcaacctccgcctcctgggttcaagcgattcttctgcctcagcctcctgagtagctgggattacaggcatgtgccatcacacccggctaatttttgtacttttagtagaggtggggtttca[141 bp omitted]aaagcattactcttagaaggcaaaagtgagaaaatgtagcaattttcgaagcagtaagctggacacctcagactggtgccacctgtgggctttgtctccaattagtaacaattagtaacagaggacttttagaaacaccagcttttagaagtttttctgtcaatttgaaaatacagatatattgagatattttgtaaaagtcattttattttatttgattattttatattttttagacaaggtctcagtctgtactccaggctggagtacagtgatacgatctcagctcactgcaacatccacctcctaggttcaagtgattctcctgctttagcctcccaagtagctgggactacaggcacctgccagcatgcccggctaatttttgtattattattatttttttagtgaagatggggtttcaccatgttggccaggctggtctcaaactcttaacttcaagtgatccacctgttttggcctcccaaagtgttgggattacaggcatgagccaccgtgcctggcccattttaatttttattaataacttcattgtgttttacaacattatcagtctgccactgatggaaatgaaaaataaaacaagacaaaactggtccaaaacaataggtaatttgaaaagcagtgaaatagacaacattaaaatcaagaaatactaatgaaacaaaatgcaaataggaaaggtgtctgcagaactttaattgccaagagaatataagaatacattcaaataaatgaaggaaaaggggtaaacaaatacacattatgaagatatctaaggttcaattaacatgtgagggtttaacttctcaatcatcagggaaatggatattacaaccacaacaaaaccacaagtcattggatcgacaaacattaaaaagtctcacaatcctaagtgttggggaagatgctgaccatcagaagccctgggaaaagccctttagaaagctctcgagcagcatccactaatgccagatatcccagtgagcagcgactccaatcccagcagagaaacgctcaggctcaattcaaatgacaggcaggcacattcacagcagagccacctgtgatagctgcacagtgaagacagcaaatgtccacctgcagcagggtgggtaaagggtgatgcattcactgcagaaagtcaccagcagtgtagatcagccactccaggccctctgggatctgaagaactttgcaggcacaggccccctataaatccagtaataacctggggcctgagtgattttcattcacagagccaccctcctcttggggctgagaccctgagtgttttttgcccatagagtcatccccttcttggtactgagaggtcatggtggagactgaggatccctccaaggggtctaggggtaggagcagctctgtgaagtgagggaataactgggtgtctggcaagaagtcggaggcatcggggctctgaggccataagggggctggggctgggagtgatcctgggcctgggattggagctgggactgagcctgagcctgggcctgagcctgggcctaaaatcggggctaggcctggaagtgagccagggcttcgcatccggccaggacttaagatgggacctgggccttggagtctgcctgggcctgggatctgggctgggctgggaatcgggcctataattgggcctgggcctgagattgggcctgggattgggcctgggatcaggcctgggttcgggcctgagattgggcctgggatcgggcctgggttcgggcctgagattgggcctgggattgggcctgggatcgggcctgggtttgggcctgagattgggcctgagattgggcctgggatcgggcctgggatcgggactgagattgggcctgggatcgggcctgagattgggcctgggatcgggcctgggtttgggcctgggatcgggcctgggtttgggcctgagaatgggcctgagattgggcctgggatcggggctgggcctgaaattgggcctgggattgggccacggaatgggcctgggatctggactgggcctgaaattgggcctgggattggggctgggatcgggcttgggatctgagctgggcctggaattgggcctggaattgagccagggagtgggcctgggatctgggctgggcctgggattggggcagggatcgggccagggcctggactcagggcagctgggatgcccttctgggctctgcacccagggccaccccaggcctggtggaggctgcagatcgtgggttccgccgctggaaggattcccgaggggccccgctgaggtgcggaggcagaggctgcagggactaggggcgcagcgcgggctcctcggcctctctgcccagggacgcgctggggctgctgctggagccgccgctcccgagctagtttggcgcggcgattcttgaaccacacctggggggcagaggggacagggagaaggtgtgaaggaggggctcgcgcggcccagtgagccttttggggtcggggccagcctgaagcctctccctgtgctcaacagccccccatcccccaccccaccaaaagagggccccggctccaaggcctggagaatggagggaagagggagggaaaagtagggggaggagggtggggtgggatgggaggagcggggtctgccgcccaggtgcccggggggccagggagggttcgaggggagggaccgcgggttctcacgggtgcctgaggtccgggcaccgggagaccccgtgggggacagcctgggccgatcatgtgggcgagtttgggctagcatagagttggaacaggactcaggatgcagccctggtctacactggcgggaccccttgcgtggcagggcgggaggtggtcgggcgggccaggccccggtgagtgacagcggtggggaggctccttggggtgactggggcgggcagggtgggggtgggggtcagacctgcagctgttgctccctgaggctgagcatctccgccagattcagtcgctggtcgtagttcgggtactggtccttctgaaagtaaaattctagcactttctgctggctttcagtgtagaccgtgcgctcctgccgctgtctccttggagggtccagggccaggggagggcctgggggtgggagggaaacaggtcacagaaacccccaggcagcccccagcccccctagggaccccgtcccctgcaccaggccaggagcccaggcagtgtgggctggggcggcaccgcggatagcagcctggtatccagaccagaccttgcacctctctgggcctcagggtccacatctaggaaataggcgcgataacagctcctgggaaggcaggcagcgtaggcgcctcacctcggagcagacggggctgcctcaggcctgctcaaccctccccagctgccccgtcccctcccatccaagggttatagggaccctgacacttgcaggggagccgccacctgcccagtcctctgctccactcaactgcatggtttaatttctttccttctttctttttcttggaggggatctcgctctgtcacccaggctggagtgcagtgatgtgatcacggctcaagtcagcctccacttcctgggctcaaggaaccccccgccttagtctcccgagtagctgggaccacaggtgtgcaccacgacccctgggtaatttttgtatttttgctaaagacgggtctccactatgttggctcggctggtttcagagtcccgggctcaagtgatcctcccaccttggcttcccaaagagctgggatcacaggcgtgagacgctacacccagctgcatgatttttcatttcccagacaccactaagttctcccccgtctgcaggacaggaagccgcccgcacaggcccagcccttctctggctgcccagatttgcactctgcagcctcagccacaggatcagcccagacccctcacacctctgtccccgctcaccttggagatgaccagggtcttgcatcctgagtcctgatctgttcccaaacacaagtgtgtactgacaagggcttggctcttaaatcacttctctgctgtgcccaccctggcccaccctgccgggaccctccctttcccaccctgccctgcagtcccgccccctggaggagttgaatgatggattaatccttcatcactgatcaggtactgcctgctgagctgtgctaggagctggagaacctcagtggacaacacagccttggtttcaccctcatgggccctagcccaggtgaggtggcattccatgcgggtttggttgggggagtcaacatcgtgacctgtggttggggtccccatctcaggagaggcaccgccagccagcccccaggagtcatccttgttccttcccagggctggggccccgagtgaccaatgccggtgagtctacccactcctcctggctcctgggctgcctgccttgtccagccactatccctccttcctggatgaccttgcaacctcctctttggtacctcaaggccactctggcccctactatccattccaaaaattgctccctaggtgcctataggtgtaagcagagcttagtacacattggccctgctgataatggtttggtttctgtagtggatttgcctatggggtgaagttctgataggcattcacatagacctctgttggtttctcctggagagtaaatgacctcagtgctggtttattccagtttatatacggggctcgtgtgctgggttcacatgagcccagcctctccaagctgcatagacctgtatcaggagggggcacaggtctgatggacgtgcccatggaccgctgctggtctgcccttgtgagtgaatgaacctactgctgatgatacaggggacccatgaccttggtctacagagatcggatccctcagagatgcgtcttctctgtcagacacctggctgtcctcatttccccatggcaggacccacgtgggttcagggattagagagattgacaaggctcatggtgcagggaactagaaatgactcatgcaatcaatttcaaaattcaataaaacgtagacattgttaccacgggcctcgctcattgttttcacctgctacttagagttctgctgtagaaagcagcatccccagcaatgattcctcatcgcacacattgtccggcttcatctacaggacatgctgggaacacagtagtgaccacagagattttgcaccatggctatttatttggtcaataaagacataaacagatgaacaagctcactggtactattttgtgaaaatagacatttaaatataagcaagttcacggcagcatgattcactatcgcccaaaaggagaaaatgctga[139 bp omitted]catggcgaaaccctgtctactaaaaatacaaaaattagctgggcgtggtggccagcacctgaatttcagctacttgggaggctgaggcgggggaattggttgaacccgggaggcggaggctacagggagtggagattgtgccactgtactccagcc[138 bp omitted]catggtgaaaatccgtctctactaaaaatacaaaaaattagccaagcatggtggcgggagcctgtaatcccagctacttgttaggctgaggtaggagaatcacttgaacccgggaggcagaggttgcagggagctgagatggtgccactgaactccagcctgggtgacagagggagactctgcctcaaaaaacaaaacaacatcccccaaaaaaacccacaaaaaatagaaacccaaaatgtcatatatttacacaatgggatattactcaaccatgaaaaggaataaagctctgatacgtgctacaacatggatgaaccttgccaacatgatgccgagtgaaagacgccagactcaaaagcacatatacgattctatttatacaaagtgtccagaataggcaaatccatagagacagaaagcagattagtggttgctacgggttggggagaagggaaaattgggaccaactgggaatagctatggagatagctattggggacggtgaaaaatgttctaaaattgactgtagtgaaggaggcacaactctgcaaacagactaaagacgatttaattttttttttttgagatggcgtcttgccctgtcacccaggctggagtgcagtagtggtgtgatctcggcttgctgcaacctccatctcccgggttcaagtgatactcctgcctcagtcgcccaagtagctgggattacaggcatgcaccaccacgcccagctaactttttgtatttttagtagagaatgggtttcaccatgttggccaggctggcctcgaatgcctgacctcaagtgatccacccatctcggcctcccaaagtgctgggattacaggtgtgaaacaccgcgcccggccaaaaccatttcattttgtactttatgattattcttttctttttgttttgccgtgttgcccagtctcgtctcgaactcctgagtttaaacaaccagcccaccttgcctcccaaagtactgatattacaggcgtgaaccagcgtgcccggcctgaattgtatactttatttaattaaatttatttatgtatttgttttgagacagagtctctgttgcccaggctgcagtgcagtggattgatctcagctctgcctcctgggttcaagtgattctcatgcctcagcctcctgagtagctgggattacaggtgtgtgttaccacacccagtaaaaaattttttctatttttagtagagatggggtttcaccatgttagccaggctagtctcgaactcctggcctcaagtaattcgctctccttagcttctcaaagtgctgggattacaggcatgaaccatggcacccagccctgaattgtatactttaagtgggtacttttatattacgtggatgacatatcaataaaaaatataaattaatgcaaaactcagcatattgccctgtggattggccaagatcaaagagatggatcaagtgtagacccagagaatgtggttttctcttgccattgatgaagtgtaggttggtaaaatatttttggaggtttttttttgaaattgactctgtgacatctattaaaggatgaaatgtgtatagtaccctttgactcaatgattttttttgagacagggtcttgctctgttgcccagattggagtgcagtggagtcaatcgaaactcactgcaacctcgaactctggggtttaagcgatcctgcaacctcagcctcctgagtaggtgggactacaggcaagtaccaccatgtccgggtaattttcttattttattttattttctttatttgttttgagatggaatttcactcttcttgcccaggctggagtgcaatggcgcgatctcagctcactgcaacctccgcctcccaggttcaagcaattctcctgcctc[132 bp omitted]ctcagcctcccaaagttctgggattacaggtgtgagccaccatgcctggccaattttcttattttatttatttatttattgagaccgagtctcgatctgtcacccagactaaagtgcagtggctctgcactttaatgcagatatcggctcactgcaacctctgcctcctgggttcaagtgattctcctgccttccgagtagctgggactacaggcgcctgccaccacatctggctaatttttaaatttttatttaatttttattttatttttagtagagatggggtttcaccatgttggccaggctggtcttgaactcctgacctcaagtgatccgcgcaccttggcctcccaaaatgctgggattacaggtgtgagccaccgtgcctggcctcaatgttttattgtaagagacttatcctgggaaaatacttgctccgctgtgaataagcgcagatatcagtgttcagtgtaacatttctttgaaatatcaactgagttaattggattaattcacgcccacaaattagaagatgattaatttgtggcagcctcagactatggaatgctaatgaaagtttaagaaagggatgaagtggtaaccaattagtaagaaatgatgatctttaatgtatttgttgttttgtttgcctggtggatgtctgcttgctgtttgctgaaataaatgtgtcttgaacacagagactttgttgggcttttttttccctcccaaatccccatgtctgtaataggaaaagctcaaaggtgctgagtaataatgtactaaatgattgagtttgtgttttccatatcaaatgctgtctcaggcacattgtttattttgaagaatgtacacatttaataagcacatacaaaaaatatatattatacatatacatattcttttttcttttctttttctttcctttttttttggagacagggtctctctctatcacccaggctgcgttgcactgtcatgatctcggctcactgcaacctctccctccttggctcaagccattctcccacctcagcctcccaagtagctgagaggacaggcgcatgtgccaccacatctggctaatttttgtattttttgtagagacggggttttgccatgttacccaggctgacctctaactcctgacctcaagtgatccatccatgttggcctcccaaagtgctgagattacgggtgtgagcacaatatatttgaatgaacaataaataacaacaaagataaaaactcctgcaaaagtaattacccagagatgacgcggaatgtctattttctctatttcctgctgtttataattattattttttaatggacaacctggaaaacaagaagcatttctggccttgaatgccaccctaggactcgtcaacaccctgcccacagaagtccccatgccttttctcgtcctgatgtgtcttcagggttggatggaatttctggagattcctcctggggctccccaggcaatggccaaattcctagagtcaggtggatggagggaggtcttctgaagcctggggcaagagtgatgtaagtgggaatgaagtcggtggaaaagt[131 bp omitted]cgaaaccctgtctctactagaaatacaaaaatgagctgggtgtggtggagggcgcctgtaatcccagctacttgggaggctgagttaggagaatcacttgaacccctgaggcagaggttgccgtgagctgagattgtgccactgcactccagccccggcgacagagtgagactccatctcaaaaaaaaaaaaaaaaaaaaaaaaaaatctattcttattt[165 bp omitted]tgcctcagcctcctgagtagctgggattacaggcgcccaccaccacgcccggctaatttttgtattttcagtagagacagcatttcaccatattggccagactggtcttgaactcctgaccctgtggtctgcccgcctcagcctcccaaagtgctgggattacaggcgcgtccagccttccatcaattcttcaatctcctcttttaccctatgcctgtgggctctgatggggttgacctcttggtggggttgactcatctttgctcctgcccccaagaggcccacagacacctccccatcctctgcattgtgagggtatctcttggtgcagggggagggggttcaggaggggcacatgggcaacaaggagttgtttgggctttgaagacaatattggggcagatcagagtgggggtgacaaaggcatgaggttggcctttgctttctagaatcttgttgttcaatgtctttctgacattggggttcctctcggtgtctggacattcattcttgaaacactgtccttgctctctgtttttttttttttttaattttattttttgagacaggatctctctctgtcacccaggctggaccgcagtggagtgatctcaggtcactgcaacttctgcctcccgggttcaagggattctccttcctcagcctccagagtagctgggattacaggcgcccgccaccatgcttggctaatttttgtatttttagtagagacagggtttcaccatgttggccaggatggtctcaaactcctgacctcaggtggtcagccctcctcagcctcccacagtgctaaaattacaggtgtgagccaccgcacctggccggccctgagtttaatttgaatgaatcaacaacatatattcaataaggtgtctttaaaccgaaacacgcatgaaccagggtgaggtattgatcgattgatgacaatagtgtgagcagagccttgtgggaccccaaatctgtatttcccctgggagcaggggttccttattggctgagaccatgttcatggcaacttttttttttttttttttttgagacagcgtctcactctgttgccccggctagagtacagtggcgcgatctcggctcactgcaacctccgcctcccggattcaagcgattctcctgcctcagcctcctgagtagctgggactacagtcatgcgccaccacgcccagctaatttttgtatttatagtagagatggggtttcacca[139 bp omitted]ctgcctgtatttatttatttttaatttcttttatatatattttttgagacggagtttcgctcttgttgcccaggctggagtgcaatggtgcaatctcagctccctgcaacctctgcctcctgggctcaagcaattctcctgcctcagcctcccaagtagctgggattacaggcacctgccaccacgcccggctaattttgtatttttagtagagatggagtttctccatgttggtcaggctggtcttgaactcctgacctcaggtgatccgcccacctcggcctcccaatgtgctgggattacaggagtgagccacccgtgcccggcctgagaactgtctgtatttattaagtgctcagtacattcaagggactgatctaggcacctccagagagttaacgggtgcagtccttgttctcagggaactcgttgttcaagtgggggaaggcaggcgttactcaaagaatcacagaataggctgggcgctatggctcatgcctgtaatcccagcaccttgggaggctgaggtgggtggattgcttgaggccaggagttcgagaccagcctgggcaacatagcgaga[131 bp omitted]gtgaaactctgtctctactaaaagtacaaaaaattagtcgggcatggtggtgtgtgcctgtagtcccagctacttgggaggctgaggcaggagaatcgcttgaacccaggaggggagattgcagtgagccaagatcacactgagacagaaattaaaagagagaaacagaataaagcaaaggttaagtgagaaacactgcacttcatcctgggccacagagtgagactccatctcaaaaaaaccccccaaaaccaaaaactaaacaaaaaaagcctgggcctggtggctcacgcctgtaatcctagcgctttgggaggccgaggcgggtggatcacttgaggtcaggagttcaagaccagtctggccaacatggtgaaaccccgtctgtactaaaaatacaaaaaattagccaggtatggtggcacgcgcctgtaatcctagctactcaggaggttgaagcaggagaatcgcttgaacccaggaggtggaggttacagtgagatgagctcacaccactgcactccagcctgggcgacagagtgagactgtgtctcaaaaataaataaataaataaataaataaataaataataataaataaaacaaccccccccaccccgccaaaattagccaggcggagtggcgtgctcctgtagtcccagctacttgggaggctgaggtgggaggatcgctggagtctgggaggttgaggctgcaatgagcagtgattccccgacctgcactccagcctgggcaacagggtgagaccctgtctcaacaaacaaacaacaaacaaaactccccaaaagcccacgacccccccaaaacacacaaaaaacaaaaagccacatgccaagaattaataagtaactctggatgagggaatcgggtccttgtagagaggggagttgttccagaattgcaggtggaggcactaggcactccggtgaccgtggcggcgagagtcaagctgggaagacactttccaggcgcggggagcaagatctctcagcctccaggtgccctctctgccccttggcattcccccaccctgcccctctgtctccccctttctctgttcctcagtttcccctcctcgttgtcccttgtggggtcccagtgtgtgagttgctttgtgtctacccccttccagggtctgacaagcagaaggagttttcattatatcctggcagtctgtcccccaacccccaaatcggatctaattctgctctgctgaggctggcctggcctggcctaagaggattggaacatttgctaaatgggactaggacagggtgagagaggcgtcgctggggagacccaggtgccaggacggccaccagggggcggcagaggacgagggagaccagaagacagaggggacagagaagggcgtggtgggggcggggtgggggtggggtggggagaggcagggagtggatacaggcatattccctggctgtttagggaaccacatttaaggggttagaagggtgccaacattgctgattttttttttttttgagacagagtcctgctctgtcagccaggctggagtgcagtggtgtgatctcggctgactgaaacctctgcctcctgggttcaaaggattctcctgtctcagcctcccaatagctgggaatacaggcacccaccactacgcagagcatattttcgtatttcagtagaggcggggtttcaccgtgttggccaggctggtctcgaactcctgaacttaagtgatctgttcacctcgacctcccaaagtgttgggattacaggtgtg[133 bp omitted]caacatagcgagaccctgtcttaaaaaataagaataaagtttatcattaacctctaccctgactttctactcactctcccctctctgttcctttagggataatgggggcctggagagtgggaaggggagtgcaagcatgggggtctggaggtgtctgatcaacgacctcagagatgacctgaggtttcctgagctgggaatgttttggaagggtctgaactgcaaggaatctttgcagagtcctggggtctacctctgatgtgaagcatcttgcattttggagctgtccaagtaaaacatgaaaaagaatttgatacagaattaaaaatacatttttgttttttctgagactgagtttcgctcttgtcgcccaggctggagtgcaatggtgtgatcttggctcactgcaacctctgcctcctggactcaagcaattctcctgcctcagcctcccaagtagctgggattacaggcatgtgccaccatgcctggctaattttgtatttttagcagagagggagtttcactatgttggccaggctggccttgaactcctgaccacaagtgatctgcccgtcttggcctcccaaagtgctgggattacaggtgtgagtcattgtgcttagctcaataaatagataaattatatatatatatatatatatatatatatgcaaatatatatatatatattttttttttttgagacagtcttgctatgttgcctaggctggagtgcagtggtgtgagttcggctcactgcaacctccgcctcccgggttcaagcgattgtcctgcctcagcctcctgagtagttgggattacaggcgtgcaacaccatgcccggctaagttttgtagttttagtagagatgggtttttaccatgttggtcaggctggtctcgaactcctgacctcgtgatccacccaccttggcctcccaaagtgctgggattacaggcatgagccaccgcacctggctcaaagaatactttaagtaaaattcaaaatcttcaaaagtgtttttaaaattccacgcttttaatttctacttcatgccaggcccagtggctcatgcctgtaatcccagcactttgggaggcccaggcaggaggatcacttgagatcaggaggttgagaccagcctgggcaacataatgagacccccgtctctacaaaaaaaaaaaaaaaaaaaagcaggtgtggtggtgtgcacctgtagttccagctactcaggaggctgagacgagaggatcatttgagcccaggaggttgaggcttcagtcagccgagatcacgtcactgcacttcagcctgggcaacagagcaagaccctgtctcaaaaaaaaaatgtaaaagaaataatttccaatacagtaagtagcaatagatatatagtcaatatcaacaaaagctctttgagccttcggttactttaaatttcaagagctggagaggaccctggagtgtttctttgggacttgggacaagtcttatttagactctgggtcatgtgtagcggggtagttgagggcacggttttgagaggcaaacacggctgacccaaatattgtttttctgtttatttatttatatttatatatatatttttgagacaggatcttgctctgttgcccaggctggcatgcagtggtgtggtgagtctcggctcactgcatcctccgcctcgcgggttcaagcaattctcatgcctcagcctcctgagtagctgggattataggcgcacaccaccatacagctaattttttgtatttttagtagagacggggttttgccatgtgggccaggctggtcttgaactcctgagctcaagcgatcctcccaccttggcttcccaaagtgctgggattacaggtgtgaaccactgtgcctggccttctttttaattttttaaaattatatttttttggcctccttcccctcctaatatattttattttgtagagatagggtctcactatgttgcccaggctggcctcagtctctaatccatagcctcaaatgatcctcctgccttggcctcccaaacccctgggaatttttttttttttttttttttgagatggagtctcacgccgtcgcccaggctggagtgcggtggcacaatctcggctcactgcaagcaacgcctcccaggttcatgccattctcctacctcagcctcccgagtagctgggactacaggcgcccgccac[185 bp omitted]aatgtgagcccagttttatacactggtggattatttgctattctcacttttgaaatgcctgtataagtcttctgcaacctggttgaatatcaggcattgatgttttatgatctcaaatggtggaacaagggagatcagtgtccttgccctggggatcagcctgggaggcccaaggctagttctcagagctgtggagttcggcacccactgggtcccaggttcccacctgagcagttgttctcacaggtaaggcctgaatgctcacagccaccttgtggtgcagacacacagataactccattctacaggcagggagactgagcctgggaaggagggaggtgcccacaggtcccagcttctcacacactgcatgaaccacagaccttgggaacaagatctcagggaacaataactccatggaaacttcctcccaggcggcttctggtatcatccccactttacagaggaggaaactgaggctgagagaagtgtagtctccagttctgtctcccacgtcagcggcagagccagagctgggccagcacctgccccggagcctgtgccctcctgatcaccaggtgatatggcctcttaggatgctcgccacagccccacggagctcagaggtccctttctcagaggaggaaactgaggctgagagaggtttcgtcaatttccgaggtcacacaggtgatgagtggaagaaccaggggtagaatttaaatctctttggcccccgagccccgctcttcacccccgagtctgcctgggattcctagaagatggatgaggtcagcttcctcccctgctcccatgggattcccagggctcattgtgacagcttgtcactgtatccactttgcagaggaggaaactgaggcccaggagcccatatgaagggcccaaggccacgcagtgagaaaacaacaggatttaaacccaaactcatgtggctccatgccagctcttggcaagaccctcccgactcagccatgttcagggccctcccttgttggccctgccagcctctctctgccgcatccgtaggctcctctgtccagtgaggacaaggagctgagtggatgcacccactaccaggcatgggacctggtagaagcagggattcatggcacagttagagcctgaatgaattaactcaggaacaatatgatccctgaagcatccagagattcaaacactagtgggcagccccacagtctgacctcacagtgctgcaatcacagacccttggtccttttgggaaaacatcacaccacttctctgtgccagtgtctctacctggttctgccccaccatccatccatccatccatccatcacccatccatccatccatccatccacccatccatcacccatccatccatccatccatccatccatccatcacccatccatccatccatccacccatccatcacccatccatccatccatccatccatccatcatccatccatccatccatccatccatcatccatcacccatccatccctccatccatccatccatccatccatccctccgtccatccatccatccatttctttcacatttattgaacacacacttactgctgtgtgtctgggacagtcctaggtactgggaatacagctgagaacaagacagacagggccccatcctcctgacaagggcagacaagaaacaagatgtcagtaagagttttgcaaaagattaaataggatgaatgtgttagggagctaagggggtgcaggtatgaggagcacccccatcctgcagtagagcctggagtgaaactcatcaacaacctgatccaaggatcctccagtattccatacatcttcagactgtccccagaatttaaccccactttttttgtttattatactttaagttctagggtacatgtgcacaacgtgcaggtttgttacatatggatacatgtgccatgttggtttgctgcacccattaactcatcatttacattaggtatttctcctaatgctattcctccccctgccccccaccccacaacaggcccctgtgtgtgatgttccccaccctgtgtccaagtgttctcattgttcaattctcacctatgagcgagagcatgcggtgtttggttttctgtccttgtgatagtttgctcagaatgatggtttccagcttcatccatgtccctgcataggacatgaactcatccttttttatggctgcatagtattccatggtgtatatgtgccacattttcttaatccttaaccccactttttccagctgcaatcatgtgcattacaataagtctcaaagtcaggtagcgtaagttctccaactcgttttatttttccaagactgctttgattattctagatcatttatattccatagcaacttcagaatcagtttgacaatcaatttctacagaaaaatcctgatgagattctgattgggattgcagtaaatctaaagattagtttgagaagaattgacctcttaataacattgagtcttctaaaccatgaacatggtatagttcactattgacttgagtctcctttaatttcttccagcagtgctttatattgtttcagtaggataatgatctgatagaagagatgacaggacttatggatggattggatgtaagtggtgaggagaaaggggttaggggccaggctgagtgcccagatttctgcctgagccactgggtggagatgagaaggaaagcaagttgcctcagaagacctagctcagagaagaagtgcttggatttgatttcagcttacttgatcccagggccatgtgcaggaccagctgaaacccacctctctgtacccccacccctggaaggactctggatccaggagccaaccagtacccagattccccagggcaggtgatttaagagttgctgacaccttctctgtcccgctggaagttattttctcctccctctccctgtacagctgaccttccttccctgctgcagggccagggggtctgttccaggactggattctcccatcaggagcctctggactggtcgccgagggtcagacggcccctccctctcttgctgtcatccctggctcttcaagctaatgagacctgtcctgattcctcagccaggcctgtagccttaatctctcctagcagggggtttgggggagggaggaggagaaagaaagggccccttatggctgagacacaatgacccagccacaaggagggattaccgggcgtgtgtgtgtgtgtgtgtgtgtgtgcttgcgtgcgtgtttgggtgcacggggaagtgaaacagacccgtgtgggacccaggagctcagggacatattaatatctagagagacagacgagaggagagagacacaaagagggccagagaccaggaaaatcagaaatacagagcaacagaggtaccaagacagggagaaggacagaaatgaaaggaaatcctcccagctactcgggaggctgaggcaggagaattgcttgaaccggggaggtggaggttgcagtgagccgagatggtgccactgcactccagcctgggtgacagagcaagactctgtctccaaacaaaaacaaaacaaaacagaaatgaagggcaatccagggagaggggaagcaagaatcagagagagagagagagagagagagagacagggaaaaagagaaggaggaacagagattggagctgcagaggataagcgaggacagagggacagagatgaggctggagttacagggacaggtggacaggcagaaagacagcaaagggagggacagacagacaggaacagaaggacatggaggctgagggagaggggagaaagagcaagatagacagggagacacagagaaaaagaataagagagaccaaggggataatgcaggtttatcaacagagacagggacggagaggagcagatggagaatgaaagagtggtattcaggaaagtaggcagaaatgccacagcctaaggcccacaggaaaagaaactgaggtacagagaagccagacaaagaccaatggtgtgtagagagatggtgagtgctgggtttgttggctcacgcctgcaatcccagcactttgggaggccgaggtgggaggattgcttgaggccaggagtttgaagccagcctgggcaacatagagcgactccatctctacgaaaataaaaaaattagctgggcatcgtggtatgtgcctgtaaagtctcagctactggggaggctgaggagggaggatcccttgagcacaggaggtcaaggctgcagtgagctgtgatcatgccactgcactccagcctgggcgacagagtgagaccctgtctcaaccaaaaaaaaaaaaaaggaaaaaaaaaagaaaaaaatcccaaaccccaaactccaccaaaaacagaaaaacaaaacaccctttctaataagtctgcctattttcagtgctggaagcagcccctgccacctccgcccccaaaaagaggagaatatcatgtctgacaacacagagacagagaggccacagacaagacttgaccaagtcaaagagagagaaacaggggaaactgaggcagaaaccgagaccaatgaggcactacagagataaactagctgtcggacagactgttgtggagagaaagggggacccaggagagggatcccgaaagctccgtgcctctcttttttcagacgatctctcaggaccatctgacagtgctctccttcctctttgatgcctctctcttgggatactagctgaagctggagagacaccagttagacctaaggaaggacttccctgaggagtaggggcttatggtcaccggcaggagctggggcctcccttccccatcagccctaattgccaagatgtcatggggggaagaggaggggattaagcagacgggtgcccctccccctcccagccaatgtcacctcctggtgcccagtcgagtcccccaccttggccgggattaccctccgagttccaggccatgacaaatgacatcactcccggcccaggcttaaaatctccccatgtgaggggatgtgtttccttcagcctctgctgtctggccgctctgtctaggtcctgggccacgggagagccccgtccctcctttctgaaggtgagcgtctgcaggagaggcggaggggaccgaggaggggagaaaaaagagaggggagaagttgggtttatcttattcgtggctgtgtttgccgtgctctgcaggtgatgtttgctgaatagtcacacacaaaacagaggtgccgtcctggcatttgtggaaacggggctaggctgtgattgcagcaggagggagtaaggttagacagcagggactggctgatggcactcggggcattgggaggattcagggtggcttgtgggcaagggggtcccctcaagccctgacggcatccggggttgggggcttctcaccgtggttctaaggcaactcctcagcataccgctctgttggatgttctttaaaactcttagcactgcctgaaattttcatttgcgcgatgatccacaaatggcctgtctccctcccttgttgagcactgatttttccccagtgcccagcgtgtggttgggatttgcctaaatatgtgttgcatagatggatggatgaatgacagacaagggacggaacagacatatacgcagagagcccaggtctgtggctgcaacaggaagaactccgggtggacttgggcctgcccgagagagccaggaatgtgatgactggggatcactgtgctggtgaattgatcacttagggcctcaatgcacccagaggctctggctttcagcccaggctctacttcgggactggggaatcctcacgcccccgccctcttagcttccagcacagtcactctctctgatcttctttctgcaaagtttttttttgtttgtttttgagatggagtcttgctctgttgcccaagctggagtgcagtgccacgatctccactcactgcaacctctacctcctaggtccaaggagtccatccacctcagcctcttgagtagctggaattacaggcgcgtgcccccatgcccagctattttttgtatttttagtagagatggggggtctctccatgttgtccaggctggtctcgaactcctgacctcaagtgatcagcccgcctgagcctcccaaagtgctgggattatgggtatgagcctctgcgcccagccggtctcctgcaaaactcttgattgacaccttgtttcccgtctgcccctgtcaggagggctgaggccttgtctgtcttgctctcggctgtattcccagtgcttgggtcagtcctagacacacagtgagtgctcagtgaatatgcagggaatgaatgaatgaatgaagggcagaagggtagaagcaggtagacagactgccacagagaggaggtgtgatgcggttttcccaaaaggaacgagcgagggctgtgattgccacagagtgaggtccgacttcagggctgcccactgtgtgtgaatttctggatgcttcagggatcacattgttgatcacggagttgatttgctcaggctctaactgtgccgtggatcccagcttcccccaggtctcatggccggcagtgggtgcatccacccagctccttgtccccgctggacagaggagccaacagaggctgcagagagaggctggagtggctgacaagggagggccctgaatgtggctgagctgggagggtcttgccaagggctggcatgaagccacatgagtctggttttttttttttttttttgagacggagtctcactctgtggcccaggctggagtgcagtggcatgacctcagctcagtgcaacctccacctcccaggttcaagcgattctcctgcctcagcctctcaagtatctgggattacaggcgtgcaccaccatgcctggcttatttttgtatttttagtagagatggggtttc[143 bp omitted]cttggacccctcatgtgggctctctgggccttggttgcctcctctgcaaagtggggacaatgataagctgtcaccatgatccagccagatgagccatattgcaggcctggcctgcagtgggagcagggcaggagaccagcctcattctgtttctagggtccctaggtagacttgggggtgaagagcggggctcgggggccaaagagatttaaattttacccctggttcttccactcatcacctgtgtgacctcgggaattgacgaaacctctttcagcctcagtttcctcctctgagaaagggacctctgagctccgtggggctgtggggagcatcctaagaggccatatcgccgggtgatcaggagggcaccggctccggggcaggtgctggcccagctctggctctgccgctgacgtgcgagacagaactggagactacacttctctcagcctcagtttccttctctgtaaagtggggatgataccagaagccgcctgggaggaagtttccatggagttactgttgcctgagatcttgttcccaaggtccatggtgcatgcagtgtgtgagaagctggggccccctggaggtccttaaggtcatcagccacctgaactgtgggcacctccctccctcccaggctcagtctcccccgctgtagaatggagttatctgcatgtctgccccaccaggtggctgtgagcattcagacctcacctgtgggaacaactgctcagctgggaacctgggacccagtgagtgccgaaccccacagctctgagaatcagcctggggcctcccaggttgatccccagggcagagacactgatattctttgttccaccccttgaaatcataaaacatcagtgtctggaaattgttgtcattgtgagatcttgtatataaagcctgggccaagtgtctgccgagtgatgaattcctggacattcttttttttttttcctccccaggagacaggtcctctttcgattgattgattttttttttttttttttgggatggagtcgtgctctgtcgcccaggttggaatgcagtggtgcaatctcagctcactgcagcctccgcctcccgagttcaagagatttttgtacctcagcctccccagaagctgggacaacaccatgcccggctaatttttgtatttttagtagacggggtttcaccacgttggccaggctggccttgaactcctgacctcaagtgatccgcctgcttcagcctcccaaagtgctgagccactggcctggcctgttttgttttgttttgagagaggatcttgctctgttgcccaggctggagtgcagtggctggatcatagctcactgcagcctccaactcctgggctcaagcgatcttcccacctcagcctcccagagtgctgggattacaggtacgtgccaccacgcccagccctcactggaggcccttctgtcatcagctgcctcaggttgctgccaaacccagggaaagatttcagtggatgttcaatattattattgttattattctctgctgacatcttgtctaggcagcactttatcattattatcagctgtttgatctggggcccacactttcctcctgctgagcctcctctcccctatccgttaaaagggatgatcctggccaggcactgtggcccacgcctgtgattccagcacttagggaggccgaggtgggcggatcacctgaggtcagaagtttgagaccagcctggccaacatggagaaacccaatctctactaaaaatacaaaaaaaaaattagccaggcatgatggcacatgcctgttgtcccaggttgggaggctgaggcagaagaatcgcttgaatccgggaggtggaggttgcagtgagccaagattgcgccactgcactccagcatgggtgacagagactccgtctcaaaataacaacaacaacaaaaacaaaaacccagaaagtggtgatcgtaaatgtgagctttcttggctttcctggaaggttaactgcttagccaggcaatctgactcagatttgacggcgaagacaatgaaagtgtgtgcttttgttccaggccctgcaaatggtccccagtggggcaggttcaccagtttccttgtctccactctctggaggttcatatttaacattattggtttttggagaagtgggagaggacagagggaacccaggttagggggctgggggaataggaccttcaggaattactctagccttgaaatcctggattctccactgccagcctgtgtgtgatcccgggtaagtcacactttcgagcctgaagatgttctctaaactgtaagcatcaggcaaaagcagtgtctcatgcctgtaatctcagcaatttgggaggctgaggcaggaggatctgctcaggccaggagttcaagaccagcctgggcaacatggcaagacacctctctctacacaaaaatttaaaaaattagctaggcgttgtggcacacctgtagtcccagctacttgggaggctgaggtgggaggatggcttgagctcaggaggtcgaggctgcagtgagctatgattgtgccactgcactccagcctgggtgacagagtgacatgctgtccctaagaccaaaaccaaaaccaaaatgtaagcatcatagtaatacagtctctacctcccaaggttgtgctggggatttaatgactacctgtatagagaaggcttgtgtattagttaactattgctgggtaacacttatcctaaaattgagcagcttcaaacaataaacatttctgatctcttatagtttccaagggacaggaatccaagagtggcttaactggattattccggctcagggtgttccatgtggttgtggtcagatgtcggccaggactgaagtcacttaatggcttggctgaggctggggaactaacctccatggtagcttactctcatagctgttggcaggaggcctcatttctttgccacatagacctctccgtgggatggcttgagcatcctcacaacatggcggctggctttccttagagctagccttggaagccacgctctgtcatttctgcaatatcctgttggttacacacgtcagccagcttgttagtagggactacacagggcatgaatatcagggggtaaggattattgggagttaccttggaggcagtttgattttggggatttaatgtagctgcttttgattttattgtcagcactgagccttctcgtgacattcctaccaggttttacttgttctttctgcttttctccatgatcaatctgctatggtcacacagggtgccttgtttcttctccaacaagaccaagttggagaccctgtcttgctcagggtgacggtgtgagattccagcctccaagcctttgcacctgctgtttttttaattttttttttttgcctggaaatctctattccagatccacacaaattcctagatgcctcacccaccccaaatgccttcactctcataacaacctgttttattttcctgggagttcttgaaactttctgaaggctttttttttttttttttttttgacagagtcttgctctgttgcccaggctggagtgcagtagtgccatctcagctcactgcaacctccgcctcccgggttcaagcgattctcaagtagttgggattacaggcacccatcatcatgtctggctaatttttgtattttagtagagatggggtttcaccatgttggccaggctgatctcaaactcctgacctcaagtgatcctcataactcagcctcccaaagtgttgggattacaggcaagagcccctgctcctggccatggcatct[154 bp omitted]tctactaaaaatacaaaaattagccaggtatggtggcaggcccctgtagtctcagctacttgggaggctgaggcaggagaatcacttgaccctgggaggcagaggctgcagtgagccgagatcaagccattgcactccagcctgggggacaagagtgagacttcatctcaaaaaaaaaaaatttttttttccttgtttgttattggtttctctaggaacggaaccaagaagttcaattctatgagaacagagaagctgcggtcttatttcttcctatattcctagttcctagagcagggaaggcattcaaaaaatatttactgaatgaacagtagaatctcaacttaaaataaacagaatctgtccccctcctcatgtgagggatgagaaggaaaggacagtgagaggaacggaagagtgggagctcacaataaacaccatccatttttaattctttttcttatgtttcaaatatttattgggggtgctggggacatggcaggaaccgagatattaccagtccctgaactcaggtaactgatagaatttgagggagagagatagataaacaaacatataaatatgtcgtttaatacaagctgtgtcttgaagaaaaggaggtagggagcgtgtgtgtgtgtgtgtaaaatccagtttaggggcgtaggttgctttctctggggaaagtagctgagctgagacgtggaggagaaggggttagctggtgagaggggctttggggtgggggagaggcgttcctagcccaggaaacggcttatgcaaatagctgtggagggtgagaggttttctgagtccatcctaatgagggcaatgaggaaccctcagagggttttcatgttctgtttgcttttttgaagattttattgttgtttttgcttttgacaagaacacacacacacacacacacacacacacacacacacacacacacacacaattaaaaagtaatccaaactatagagacaagatatggctttagcattccttcccagaggcagtcactggtgccagtagcttgcttccttcctgggaattttctacgcatatacaagtgtatattctacacatgagtaaaatcaatgcctcattttgtttattaattcataattataatacttattatttttgagatggagtctcactctgcctcccaggctggagtgcactggcataatctcggctcactgcaacctccacctcccaggttccagagggtctcctgcctccgcttcccaagtagctgggattacaggcatgcaccaccatgcctggctaatttttgtatttttattttattgtatttttatttttaaatttactttattattatgactctttttttgagatggagtttcgctcttgttgcccaggctggagtgcaatggcgtgatctcggctcactgcaacctctgcctcccgggttcaagtgattctcctgcctcagcctctggagtagctgggattacaggcgcccaccaccacgcctgcctaattttgtatttttagtagagacagggttttgccatgttggccaggctggtcttgaactcttgacctcaggtgatccatctgcctcggcctcccaaagtgctggcattacaggcgtgagcaactgcacctggcctatttattgttattattgagacaaggtcttcctctattgcctaggctggtgtgcggtggcatgctcatagctcactgcagtctccaaatcctgggctccagtgatcctcctgcctcagcctcctgagtagctgagactacaggtgcggaccaccatgcctgaccaatttttgtatttttttttttgtggagacagcgttttgccatgttacccaggctggtctcgaactcctgggctcaagcaatctgcccaccttgacctcccaaagtgctgagattataggtgtgagacacagcacctggccatctgcattgttttaaaaatcacaaatggttgcgaggtatacatactgcccagcaccatacttgtttcctttgaatatataaatattataattttataatatttataatatataataacacaaataataataaatatatatggtttggtcatatacaatatataaaataacattcacaaacacttattgtcaaagtgcaattaaatgggaaaaaaagaaaaacatttggccaggtgtggtggctcatgtctgtagtcctagcactttgggaggctgaggtgggaagatcacttgagcccaggagttggaggctgcagtgagctatggcaacgccgctgcactccggcctggatgacagagggagaccttgtctcttaaaaaaccccaaaaaacaaatctgattctctgacgcatatataataagcacaggtcaaagatttatttaag[136 bp omitted]tggtgaaaccccgactctactaaaaatacaaaaattagctgggcgtggtggcgggtgcctgaggtcaggagttcgagaccagcttggctaacaatggtgaaaccttgtctttactaagaatacaaaaaattagctgggtgtggtggctcatgcctgtaatcccagctacttgggaagctgaggcaggagaataacttgaacccaggaggtggagtttgcagcaagccgagattgtgccactgcactccagcctgggcgacagaacaagactccattaaaaaaaaaaaaaaggagaatttgatgaacagaagttgataggtttagtcaggaaagacgggctggagaaaatttgccaggttagatacaaaactggttaaagacctacaggacaatacaactgtaacctttgaggttaccttttctaccagagagaaatcatttgcaaccaaacttcctggggttaccatttaccttgtcgaagtctagactctaatcaataatgaataacagaccgggtgtagtggctgacgcctgtaatcccagcactttgggaagc[134 bp omitted]gaggcaggagaatcgcttgaacccaggaggcagaagt[133 bp omitted]cccggtttgtagtctgttaggcatggggttgcacagctggtgagcaagcattactgcctgagccccgcctcctgtcagatcagcggtggctctagactctcacaggaacgtgaaccctattgtgaactgcacgtgcgagagatctaggttgtacactccttatgaaaatctaaggcactgcccactcccatccatggaaaaattatcttctacgaaaccagtttttggtgccaaaaaggttgaggactgctgccttggaatatgaagcaaactttgggtgggtctgttagacaagactcccagatgacttggaaatggcatgctgtcagctttttttgtcttattgccgagcctagaactttttttaatttttattttttttgagatgaagtcttgctcttgtctcccaggctggagtgcagtggcacgatctgggctcactgcaacctctgcctcccgggctcaagcgattctcctgcctcagcctccagagtagctgggattacaggcgcctgccaccacgcccggataatttttgtattttagttgagacgtttcaccatgttggccaggctggtctcgaactcccgacctcaggtgatccgcctgctttggcctcccaaagtgctgggattgcagatgtgagccaccacacctggcccctagaacaattttttaaaactatataatggagatcttttaaaatcagttcagagagcagccttatgttttttttttttttttttgagacggagtctcgctctgtcgcccaagctggagtgcagtggcttgatcttggctcattgcaacttctgcctcccgggttcaagcgattctcctgcctcagcctcccgagtagctgggattacaggcacgcgccaccatgcccggctaatttttgtattttctgcagagacggggtttcaccatgttggccaggctggtctcgaacttctgacctctggtgatctgcctgccttggcctcccaaagtgctgaaattacaggcatgagccactgcgcccaggcttactttaaaaaaaaaattaattttttgtagagacaggagagtttcgctatgttgccacctgaacataaatgctattttctttttcttttcttttcttttttttgagacggagtccgtagcccaggctggggtgtggtggcaccattttggctcactacagcctccgcctcccaggttcaagcgattctcctgcctc[134 bp omitted]tggtctcccaaagtgctgggattacaggtgtgagccactgcgcctggcccataaatgcgattttcattcccattttccaacaaggcgactgaggtatacattgaaggtgaattactaggacaaaagaaagatggcattttacttcaataacagtttgttacaacctgtactgctacctatctgccatgggagtgtgcctttccccacactgacaccagtgctggaagttatcaacctccttcatctttgccaacctgataggtcaaaagtgatcatggaagatccacactcgctttttttttttttttttttttgagataggggtctatttctttttcttttttcagagatggggggtctcactatttctttttctttttttcagagatgggggtctcactatgttgcctaggctggttttgaacttctgggctcaagtgattctcctgccttgacctcccaaagtgctgggattacaggtgtgagccgccttgcttagcccttactg[142 bp omitted]ttctcctgcctcagcctcccaagtagctgggattacaggcacccgccaccacacctggctaatttttgtatttttaatagagatggggtttcaccatg[137 bp omitted]accaatccagtttgcctgggaccattctggctctagcactgaaagtcctgtgttccaagaaacacccacctctcctccaacctgggcaaagagggacggttggtcaacctgcagtcctgggttataagtgaggctgagcgtgtttgcccatggtcaagaaagaagggatcttggatgagggtgtgtaacaggatcagatttgttttgtttttttcttagagtcttgctgtgtcacccaggctggagtgcaatggcctgaacacagctcactgcagccccaaactcctgggctcaagtgatcctcccacctcagcctcctgggtagctgggattacaggcatgcatcaccacacccagttaactttttaaagaacactttttttttttttttaagagacagggtcttgctatgttgctcaggctggtctcaaactcctgggctcaagtgatcctcccgccttggcctcccaaagtgctgggatgacagatgtgagccattgtgcctagccaggacgagatttttagagggtagagtaggaataagagcttgcacttatgaggcacatgatggcttcagctgtctgctttgcagagtctcaagaaagctctgagaaccttaagcagaggccattttacatgtgaggacacagaggtacagagaggtgagataaatggccaaggtcacatacctaagaggagaaggaggcaggatttgaatcgcagcctgcacgtcaccccatggtgagtaactggtaagtgagtgagcatccctcctcttctcttgcaggccccctgacttgggcctcagtgtccccgaagatcatgatggcgtatatgaacccggggccccactattctgtcaacgccttggccctaagtggccccagtgtggatctgatgcaccaggctgtgccctacccaagtgagtacagtcgtttctcttggcaccccaggctggcctcatctcttggaggacctctggggtccctttgcccccaggaagaaggcaatcacaggggcgacttcagggccatacaccagccctctgggttcatctgaaatgtatgtcacttagaaaaacattagcagtcctagaaattcaggacagaggttccttttggggtgaggaagaggggatgtaatctggaaggggaatcaagaggaattttcatctgttaccaaaactttattatttatttatttttcagagacaaggtctcacactctgtcacccaggctggagtgcagtggtggtggtcacggctcactgcagcctcgaactcctgggctcaagcaatcctcccacctcagcctcctgagtagctgggactgcaggtgtgagccattgtgcctaggcccggggggcactttttttttttaattttatttttgagacagggtctcactctgttgcccactctgaagtgcaatggtgcaatcacagctcactacagcctcgaactcctgggctcaagcgatccttttgccttggcctcccaaatagctaggattacaggtgcacgccaccatgcctggctaacttttttaagtttttgtagattttgcaggatctggattatacaaaacatagaaaaaattattattatttttttttttgtagagattgggtctccctatgttgcccaggctggtctcaaactcttgggtccaaataatccgcctgactcagcctcccaaagtgctgggattacaggcatgagccactgcacctggcctgcaaagccttatttctttttctttttttttctttcgagacacagtttagacggagtttcgctcctgcccaggctggagtgcaatggcgcgatcttggctctttgcaacttttgcctcccaggttcaagtgattctcctgcctcagcctcccaagtagctgggattacaggcgcacaccaccatgcccggccaatttttgtaaagccttatttttaagagaagtgagtactcagttatttgtagcattattctttagctcttgtttttttttttttttttttcaagaccgagccttgttctgttaccaggctggagtgcagtggcataatcttggctcactgcaacctctgccttctgggttcaagcgattctcctccctcagcctcccgagtagctgggactacaggcatgcaccaccacacctggctaattttttgtatttttagtagagacaggggttccccatgttggccaggatagtctcaatttcttgaccttgtgatctgcctgcctcagcctcccaaagtgctgggattataggcgtgagccaccgcacccagcccagacttgctacttttataggctagaaacggttgaatgtcagcaatgtcatgcttcaactgattatgtcttagtgcataagaaagtttagaagagggaaaaacgactcgcacacctccttgttgagctaaagccttggggtcaggcatgagccacagagtgccaggcacacagtgaggtgtagaagggcagggaatgtgtattccatccttagtttaggcagatggcaaccaggatggaattcttggcatcccacccagcctcagggcctcacaccagcccatgtggatgacctgagggtcctgtttcccatcccaccccaggcgcccccaggaagcagcggcgggagcgcaccaccttcacccggagccaactggaggagctggaggcactgtttgccaagacccagtacccagacgtctatgcccgtgaggaggtggctctgaagatcaatctgcctgagtccagggttcaggtggggtggtgggtccctggacccctcccgacacttcctgtgatctcaggaggcctgcccggaacaaagagtgatgggaggagggagagatcacagagtgacagccaaagttataaaggggacaataatccctctccccaccatcccactgaccgcctcatggctctcattgcccctcgctcctctccagctgcgctggccctgacctgcctgccaagcaccctcctgccttgggcctttgcactcagtttcctctatctggaatgcttatttccagataaccacacagcaggccccatcgccttgttcgagtctttgcttatccatcagtgagacccacactgaacacagcatttaaaattgcatatgatttacatatggtatctcagagtctgtttatttagactctgtctctcccaactagaatgtcaattccactgacggacactcagagtagtagaaaatggttaatacatgtttattaactgactgaatagacggatggatggatgggtgggtggatgcatagatgaatgtatgtatgtgtgactgtaggtgtgcgtgtgcatgtatgactggaagcatggatgagtgtatgtatgtgtatatatgagtgtctgtgtgtatgatgggatggatacatgtatatatgtgtgtttgcatgaacgcacataggtatgattagatagatgatgaatgtatgcatgcatgatatatgtatacgtggtgtatgtgcacatgtatgt[137 bp omitted]tgcctcagcctcctgtgtagctgggattacaggcgtgtgccaccacaccgggctaatttttgtatttttagtagagatggggtttcaccatgttggccaggctggtctcaaactcctgacctcaggcaatcctactgcctcggccttccagagcgctgggattacaggcgtgagccaccgcgcccggccggatgggtgtatttatgtatatatgagtgtatgcatgtatatatgattggactgataaataaaatgtgtgtgttagtatgattgtatataggtatgactggatggattaatgtatatgtatgcatgatgtatgtgtgtatgatgtatgggtgtataattgtatatttgtatgtttgtataatcagatggatggatgaacatgcatatgatgtatgtatgattagatagatccattaatgcatgtatgatgtatgtgtgtatgacctatgtttatataattatatgtataagatggatgaatctatgtatgatgtatgtgtgtacaattgtatgtatcatcagatggataagtctatgtatgatgtatgtatgatcagatggactggtgaatgtgtgtatgacatatatatgtgtgaggtatgtatatatgatcagatggatgtctacataatgtatgtgtgtatggtgtatgtatgtataattgtatgcgtgtatgtttgtatgctgtaggtatgatgttacatatatgtgcatacacacgtgtgtatgattggaaggataaatgaaatatgtatgtttgtgtgattgtatgcacatatgattagatagattagtgtgtagctatgtatgctgtatgtgtgtacaatgtatgtgcctataattgtatgtttgtatgtctgtatgatcagatggatgaatatgtatatgatgtatgtatgatcagatagctggataaatgtatgcatgatgcatgtgtgtatggtgtatgcatgtataattgtatgtatgtttgcattagatggataaatgcctgtaggtatcatgtatgtacgcatacatgcatgattggatgactggatgggtttatttgtgtatatatgagtgtacgcatgtatatataattagatggataaatgaaatgtgtgtctgcatgattgtatgtatggattaatgtgtatatatgtatgatgtatgtgtgtacaatgtatgtatgtataattgtatgtttgtatgatcagatggatggatgaatgtgtatgatgtatatatgtatgatcagatggctccattaatgcatgtatgatgtatgcgtgtatgatgcatgtacacttgcatgtatgatcagatgagccagtgaatgtatgtatgatgtatatgtgtatgatgtatgtatgtatgatcagatagatgggtaaacgtatgcatgatgtatgtgcgtatggtgtatgtatgtataattgtatgtgtgcatgtttgtattagatgggtggatgaatatgtgtatgatgtatgtatgatcatatagatgggtaaatgcaggcatgatgtatgtgtgtatggtgtatgtatgtataattgtatgtgtgcatgtttgtattagatggatggatgaaaatgtgtatgatgtacgtatgatcatatagatgggtaaatgtatgcatgatatatgtgcgtatggtgtatatatgtataactgtacgtgtgcatgtttgtattagatgggtggatgaatatgtgtatgatgtatgtatgatcatatcgatgggtaaatgcaggcatgatgtatgtgcgtatggtgtatgcatgtataattgtacgtgtgcatgtttgcattagacggatgggatgaatgcacatgggtatgatgtatgcatgtgttcatgcacacatgcaggtatgattggatggatagatggatggatgggtgaatagacgccccacagctggatgcaaagtagacagatgtgaacccagcacctctcaccaataagtgtcctcatccccgggcaccctgcggctctcctgggcctcttccccacttacccacccccatctccgctcttatcccccaggtttggttcaagaaccggagggctaaatgcaggcagcagcgacagcagcagaaacagcagcagcagcccccagggggccaggccaaggcccggcctgccaagaggaaggcgggcacgtccccaagaccctccacagatgtgtgtccagaccctctgggcatctcagattcctacagtccccctctgcccggcccctcaggctccccaaccacggcagtggccactgtgtccatctggagcccagcctcagagtcccctttgcctgaggcgcagcgggctgggctggtggcctcagggccgtctctgacctccgccccctatgccatgacctacgccccggcctccgctttctgctcttccccctccgcctatgggtctccgagctcctatttcagcggcctagacccctacctttctcccatggtgccccagctagggggcccggctcttagccccctctctggcccctccgtgggaccttccctggcccagtcccccacctccctatcaggccagagctatggcgcctacagccccgtggatagcttggaattcaaggaccccacgggcacctggaaattcacctacaatcccatggaccctctggactacaaggatcagagtgcctggaagtttcagatcttgtagaggacgcagtctccatctctctccatcgggcctcgggaccctttctcttctgaatctgcttccctgcagtttagatcccgggatggcattcctgagaaagcaacccgaaccagctgtccttctgacagctcggtgttcagcttacagagaccacccctttcctccacagggagaggctcctccctctcctgggacagctcacaggtcctagtgattctctcaaccctaacaccgtctggcacgattgtgaccgctgaagtacaccacgagctccaggcttcagaaagtggtgctgagaacttgctccaagaagaagtcaaaccaaacttgcagttgatttggggtcatgtttaggtcagaatcaccgtgcccttgaacaagcaggtaggggggcttgataacttaactttccacgtggacagaatttttttttttgttttgtttttgttttgcagacacagtctagctctgtcgcccaggctggagtgcagtggcacgatctcagctcactgcaagctctacctcccgggttcacgccattctcctgcctc[177 bp omitted]cccggcccttttttttttttttttttttaattgagacggagtctcactcttttgcttaggctggagtgcagtggtgtgatctcagctcactgactgcaacctccacctcccgggttgaagcgttgctcctgcctcaatctcccaattagctgggattacaggtgtgctccatcatgcccggctaatttttctattattagtagagacagggtttt[133 bp omitted]tagggacctttctagaaattccaaagacagactttaagaagccccgtcgggaaaccttaggccaatgatgtggttacattaaaaataaattatctgggaatttcacagacttcacaaatgtcaggcttacatggtaggtttaggggaccgtttgagagacaaagatctacattcatatatgtagctatacatatatgtactttttcttcttagtttctttttaaagacattttatcactcattcgctcattagcacattgggaatgtgtgtatttggtagggaaatgaaaggcaccttgcctgttccatctctactccttttttcttttgttttaggattttctaaaggtgagacactggtggaactggggtagctgcttgggacgtaccacctatagttgtggctatttcacagagaagcagcagctagacagactcccatctgtaaataaacaagagataggaagagggggaaatagatttggaggaggcagccctacatttcaaacatacattcccttttttagatttttttttttttttttttggttttcagttttgatggtgggattggaaaatagagcttggcttgaggacattttcctggggtggcaccattatttcttgaaatagaatcttacttatggtgacactggcaagcacttgtgagaacctgaagacggattgaggtcatttgatgctcagaagttgggtgctgggtccctgccttctcagtccgagttctcctttcatttttgggtggggaggcgggttccaagagcccttcattggtggagttcacaaggcaaggtgtaaaaaaaaaagtagggcaggaagacagtggtgtgctggcagaggtctaacaatgggctctccaaggaagaggaaaaggttggttgtggagtgtttgtcagtttccgtggtgtaaatactcccaccacggctgacttcaagctagcaaccggaggtcactgaactaagagttgggaagagatagggcacaatatatgcttacgagttggtacacaccgtcagcagcagccagggtcaggagaaaggcgagatgtgaagagaggccgggaggtatcagatgacgtttccagcactagaccagaagaggtgcacacagcctagaccccctgaggggtacaccctgatctctagagcccacaaagaggtttttattcaacataaaacgtgttcatctctca[159 bp omitted]tctactaataatacaaaaattagccgggcatggtggcacgcgcctgtaatcccagctactcgggaggctgaggcaggagaattgctggaacccgggaggcggaggttgaagagagcagagattgtgccactgtgctctagcctgggtcacaagagcgaaactccgtctcaataataacaacaacaaaaataacccaggagtggctcaagagtccagtgtgggatgaaaatataaacagaggaagacaacatatgtcactggggaggctgggggagctagacaaaattcacacgggaggggcagggatgagacaatattgtgccctgggtctgtgcaaacgttgggaccagaatccactataagtttcattcttcggagacacggaagctctgcactggaggccgggactcaggcgtggaagagaatcttctccttattcaccggggaggctgtgtcttgtgcaaacaagtcatagaaacttgatgggagttggggagggactgaaggatgcatgcaaggttctgggaaggagtgagaagtagtgaaggccaaggggcccccatcacaggccgatggggtaagacttcgagagagcctgatcctggggtcttctgagactccaccaggagccggagagggcagggagccaaatccagctaggaggttacagattgcttttcctgggctgggctcctgagtgttggttcttccagctgtgcacaggggatttcaaacgttctacgtcctaaagccaggaagagtgacaaggcaggtggggacagaaggaagaagccaggagcctccctgagaaggtgtcaccttatctgtcctcctcttccccacacactggcctctgggtcccccttctctgtccacccacagagtgaaaccaattaaaatgttggatctcatttaaagtctgggtgattctttagtttccgtgttttctccaggaggggcaggtagaaacaggaactactctgttccttctgtctgtggggcctgggtccctccatgtgtttcctgtctcatcaccctcctttccttgacatctctctaaagccaatttatgaaggatcaggggctgggtgcagtggctcacgcatgtaatccagtgctctgagaagctgaggagggaagattgattaaggccaggagtttgagaccagcccaggcaacatagcgagatctctgtctctacaaaaaattaaaaaaatcaaccgggtgtggtgatgtgtgcctgtggtcccagctactcgggaggctgagatgagaggatcggttgagcccaggagtttgaggctgcagggagctatgattgcaccactgcactccagcctgggtgatgcaacaagagaccctgtctccaaaaacaaaaaataaaaaaaaaaaaaaaagaaggaggaggaggaacaggggtccccagggccagccccagccccacccatctgtaaccttccaatgcccctcccgaaaaaacaggggggtgacgagaatgctccctgcctcagtggcaggatgtgaagcttaacgccagcatttagagccacgcgcagcctctggcccgccttccctctcagcatccagccttctgcagcttcagctcttccacccctttgctttccatctcttcccccggatgcttttcagtttctcaatctcacccttgctctgtcatctcttctcctctctctctttccattcttcctcttgcctttcagactcccagctcctcatttcatttggatggattttcacctttttctttctttccttccctcttgtctctttttctttgctgcttacttttttctgactttctttctttctttctttttttttttgagacagggtctccctctctcacccaggctcaagtgcagcagcgtgatcttgaatccctccagcctctgcctcttgggttcaagcgatcctgttgtatcagcctcccgagtagctgggactacaggtgcctgccactacacctggctaattttcgtatttttagtagagacaaggttttgccatgcagcccaggctggtgtcaaactcctgggctcaagcaatccacctgtctcggcctctcaaagtgctgggattataggtgtgaaccaccatgactggcccacctctgagttcttgtttttccagctctaggtcatttttttttttttttttggagacagtgtctcgctctgtcacctaggctagagtgcagtggctcgatctcagctcactgcaacctctgcctcctgggctcaagcgattctcctgcctcagcttcccaagtagctgagacttacaggcgtccaccaccacgcctggctaatttttgtattttttagtagagacgaagtttcaccatgtttgccaggctggtctcaaactcctgacctcaagtgatccacccccctcagcctctgcaagtgctgggattataggcctgagccaccgctcctggcctctaggtcatctctctctgcctgtattcctctcagttgctgaatcccaggttaagatttttgttgggggatgactgggagttatatacaggagggagggtcaggcagacttgctgtccgagcttggcttagcctcttctggtcgtctgacctcgggtgattcatttctcccagcctcaatttccccacctgtagcatggagcatctaaggagacccatctcaagagaacaaaatgatgttattctattaattatggacctgaagccgggtccagggtaagagctcaataaatatttatctattttgtggtaaaatacacatactataaaatgtaccacttttcccattgcatgattcttaattcattttttccattttaagttacttaattcagtggcattaagtacattcacagaagaagccagacacaaagaccatatattgtattatcctaattatatgaaatattcagaataggcaaatccagccaggcacagtggctcatgcctgtaatcccagcattttgagaggctgaggtgggtggatcacttgaggccaggagtttgagaccagcctggccaacatggtgaaactccatctctactaaaatacaaaaattagctgggtgtggtggtgtgtggctgtaacccaaggtactcgggaggccgaggcaggagaatcacttgaacctgagaggtggaggttgcagtgagctgagatcgcagcactgcactccagcctggcagcctgggcaacagagtgagactctggctcaaaaaaaaaaaaaaaaaaagaaaaggcaaatccgtagagacagaaaacgtagtggctgccaggggctggggtgaggggtgctgtgtggtggaatggggagtgactgcttaatgaatatggggtttccttttgggatgacgaaaatgttctggagcaatatagtgaccttacaattctgctctgaagtatatgccgcaaagaacggaaagcaggtgttcagacaaaaacttgtacgctcaaatttatagcaggatgattcacaatggccaaaagatgaagcaattcaaatgtctgtccacagaaacaaatgaggtctacccatgcaagggaatattgctcagccatgaaaaggaagaagcactgataaacacaacttggatgaccttgaaatcatcatgctaaatatttatctttctttttttttttttttttgagacagagtctcactctgtcaccaggctagagtgcagtggcgcgatctcggctcactgcaacctccacctcccaggttcaagcaattctcctgcctcagcctcccgagtagctgggactacaggcatgcaccaccacgcccagctaatttttgtgttttttagtggagacggggtttcaccatgttggccaggatggtctccatctcttgacctcctgatccacccgcctcaacctcccaaagtgctgggattacaggtgtgagccaccacgcccggctgctaaacgtttatcttaacctattattattattattttgagatggagtcttgctgtgctgcccaggctggagtgcagtggcgcgatctctgctcactgcaacctctgcctcccaggttcaagtgattctcctgtctc[134 bp omitted]acttatgctattcctggcagctttagtcataatggccccaagctgaaaactatccagacgtccatcagcaggtgaaggcagaaacaaaccctgatgcatccatacaaaaggataccctgagccaggcacgatggctcacacctgtaatcccagtactttgggaggcctaggtgggcggatcgcttgaggtcaggagttcgagaccagcctggccagcatggaaaaaccctgtctctactaaaaacacaaaaattagctgagcgtggtggcacgtgcctgtaatcccagctacttgggaggctgaggcataagaatcgcttgaacccaggaggcagatattgcagtgagctgagattgcgcaactacactccagcctgggcggcagagcaagactctgtctcaaaaaaaaaaaaaaaaaagatattcctcactgatgaaaaggaatgaactcccagtagtcaataccccaggaaaagaaactagggctgggcacagtgattcacacctgaaactccagcactttggaagactgaggtggaaggattgcttgagctcaggagttcaagaccagcctgggcaacagagtgagaccccatgtctttaaaaaaaaaaaaaaaaaaaagaaagacagacaattaaatccaggctgggcacggtggctcacccctgtaaccccagcactttgggaggccgaggtgggaggaggatcgctttagcctgggagttccagaccagcctgggcaacatagtgagaccgtgtctctactaaaaaaattcaaaaaattagctgggtatggtggcacatgcctatagacccagctacttggggtgctaaggtgggaggatcgcttgagcccctgaagttgggactggagtgagctgagattgcaccaatgtactccagcctgggcaacagagtgagaccctgtctaaaaaaaaaaaaaaaaagaaagaaacgaaaccagaaacaaagaagcaaatactgctgaaataaataaataaaaataaaattttttaaaaaagaagcaaatattgtacaattccatgcctatgagattctagaaaagataaaacttatacagggcagagagcagatagtgcttgccaggacctagggagcagctggtgagatttactgcaaaggaacaaatgaggatcttttgggggtgctagaaatgtgccctatcttgattatggtgatggttctgggactgtatataattccccaaacttataacaccctagaaaacaaatgtatttcaataagagagtgaacagggagtcaggtaggctgggtgcggtggctcatgcctgtaatcccagcacattgggaggccgaggagggcggatcacctgaggtcagaagttcgagaccagcctggacaacatggtgaaaccccgtctctactaaaaatataaaaattagctggatgtggtcacgggtgtctgtaatcccagctacttggagggcagaggtgggagaatcacttgaacctgggaggcagaggttgcagtgagccgagaatgtgccactgcactccagcctgggcgacactgagactcttatctcaaaaaaaaaaaaaaaaaaaaaaaaaaaagagagttggggaaaaaacagaatggattttataggacataaattataccttagtaaatcagaaggaaaagaaaataaaattattgagcaggcagtggtgtaagccggttctaactcttttaatcctcagaatgatactatttttatgatccctatttcacagatgaggaaactgaggcagagggcggctgggtgacctgcccaaggtcccaagctaggaggggatggacccagtcttgatattcatcttgtcaggtggccagcctccttgctggtctctgtcccctccattttctgtccttcattttattcctgttctcgaatttttatttatgcatttgtagagatggggtcttgctatgttgcccagtctggctttgaactcctgggctgtaaatgatcctcctgcctcggcctctcaaagcgctgggattacaggggcaagccactgcgcctgaccgccactcgtgttctcttctctcttgttttccccttcctaggtctcaacggtgagtgattctctcccctcgttccctctctccgtctcttccctcacccccgtatgtgtctgtccctcctggtctccaaacaccctcccttcccccagctgtttcctctgcccctgaccaggactaatttagcaaatgctccaatcctcttatggcaacagcccagcctcagcagaatggcaggggaattagcgaggattaggttcagacgcatgacccgtgggggaggggactttggggagttttaacgaaacgatgccccctcctcctcccctcctatcccctccatggaaaagcactcgtgcctggggcacacaatgatgataaaatcacggctaaacccttcacggtgcgcctcctatgtgccaggcactgttaagccccttcactcattgaaacgtcggtgcagctccctgagggaggggccgtgcccctccctggatttaaggatcaggagaggttaattaactttcctgaggcaaatgggatccaatctcagccttcttggtgcttctcaggttaaagatgaaaaaacactggagggaagtaaactgaatgggcctgggggtcacaccgcaagggggcgcagcttctgtttgggtaacttcgggacgattttttatttatttattttttttgagacggagtcttgctctgtaatggcgaaatcctgcaacttccgcctcccgggttaaagcgattctcttgcctcagcctaccgagtagctgggattacaggtgtctgccaccacgcccggctaatttttgtattttttagtagagacggggttttgccatgttggccacgctgatctcgaactcttgacctcaggtgatccacccgccttggcctcccaaagttttagcctccgtaaagtgtggaagagagaagagagagagagagagagagagagagagagagagagagagagagagagagagagaaagaaaatgcatttcagaggagaaacggaaagcagggtggaggaagagattaggtgggaacagaacagacaaaacagacgccaggaggagctgaaggacgttatccaccggccacattcatacctcactgtgcaatttgcaatacaaaggacaccatgggaatccagctcctgacatgcacctggggcgctgggaaagacaatgactgtgagggagggataattaaggacagagtgaggggacgggtgggcacggaggccgacacctgtcatctcagcactttgggaggccaggcaggaggatcgcttgaggccaggagtctgaagctgcagtgagtcatgatcgcgccactgccctccagcctgtgcgacagagcgagatcctgcatctaaaaaaataacaaaaaacctcactgtcaacagagtaaagaggcaagtcacagaataggagaaaacatttggaaatcacacattttttaagggattgataatcagaatatacccactcctaaaactcaacagtaaaaaaaacaaaaaaccctgatttaaaaatgggcaaaggacttgaactgacagtgctccgagaagatatataaatggtgaataaacactcaacagtctggccaggcacggtggctcaagcctgtaatcccagcactctgggaggctgaggcgggcagatcacttgaggccaggagtttgagaccagcttggccaacagggtgaaaacccgtctctactaaaaatacaaaaattagccaggcacggtggcgggcacctgtaatcccagctacttggagggctgaggtgggagaatcgcttgaacctgggaggcggaggttgcagtgagacgagactgcaccactgcactcctgcctaggtgacagagcaagactctgtccccctccccacccccaacccctggcaaaaacaaacaaacaaacaacaacatcaacaacaaaaacacacacaaaaaaagacagaccatgccaagttttggtgaggatatggagtaactgaaaatgtaaactggtaaaaccgatttggaaatctgttcagcgttatctataaaatttgaacaaatggcttctctgtgaccccaaaattctacttctagtattgtactaacagaaatgcatacatggctgggtgcggtggctcacgcctgtaatcccaacactttgggaggctgaggagagtggattgcttgagtccaggagtttgagaccaacctgagcgacatagggagagcttatctcaaaaaaaagagagagagagagaaagggagggagggaaggaaggaaggaaggacacacctgtgtaatcactacccagagtgagaaacagaatattcccagcaacaccaagctgtatgagccgtgactgcaccactacacttggtttgtgaagtttcctcaaccaatgttttacttcagtgcccctataggtgggccagaaaggagacattttccagagaaaacctgaggcccagagcagtagaggaaaaagcggctattttctatgaatttgggaaaaagaaactccattcccaagacaaagggaatgtggtctagagagatcagagaaaggaaccaattttctaaaaacaggatagaccttattttattttattacttttttttttttagatggagtctcattctgttaccaaggctggagtgcagtggcacgatcaggactcactacaacctctgcctcctgggttcaagtgattcccctccctcagccacccaagtagctgggactacaggtgcacgtcaccacgtgtagctaatttttgtatttttagcgcagacaggatttcgccttgttggccaggctggtctcaaactcctgacctcaagcgatccgcccaccttggcctcccaaagtgctgggattacaggcatgagccactgcgcctggcctattttacttatattttgcatcgttaaaaaccctgcaccgtggggaattcacagtgcatgccatgaaaattgtccccagccccatggcggcccttccatggggctaccattctcagcagcttcctgtgtgtcacccttcatgcctgctgtgcatttgggagcaaaactgcctatgtcttgttttccaatttctacactttcatattatgtttatttttatttttatttttttgagacagagtctcgctctgtcacccaggctggagggcaatggcgtggtctcggctcactgcaacctctgcctctcgggttcaagagatcctcctgcctcagcctcctgagtagttgggattacaggcgtgtgccaccacacccggctaatttttgtatttttagtagagacggggtttcgccatgttggccaggctggtctcaaactcctgacctcaggtgatctgccctcctcggcctcccaaagtgctggtatcacaggcgtgagccactgcacccggctcagtttctacactttcttatctctttactttgttcctcaagcatggttcaagaaacttctgtgctttctatttttatttttttaattttttgagacaggttcttgctgagttgccctggctggagtgcagtgatgccaccacagcttactgcagccttgacctcccacactcaaatggtcctcccacctcagcctcccgagtagctgggactataggcatgcaccaccacgcccggctaatttttgtgtttctggtagagatggggtctcactttgttgcccaggctggtctcaaactcctgggctcaagcgatccccacaaccccctgcctcagcctcccaaagtgctgggattacaggtgtgaggcattgcgcctggcctccctttctttcttttccttcttttctttctcttctcttttcttctctttctttctctctctgtttctttcttttactttctttctctctctcccttccttccttccttccatccttcctttctctctccctctctttctttctttctttttttaaatagagtctcattctgtcacttaggctggaatgcaatggcacgatctcagctcactgccacctccgcctcccacgttcaagtgattctcctgcctcagcctcccgagtagctgagattacaggcacctgctacccacgccagactaatttttgtatttttagtagagatggggtttcaccatgttggccgggctggtctcaaactcctgaccttgtgatctgcctgccttggcctcccaaagtgttgggattacaggcgttagctaccgtgcctgtcttcctatttttttttcttctccccgctgcgcccccccgcgacgcccggcttcccaagctcatgatgtcttcctacttctgcacctctctcttattttgttttctgggaataacatttgagctcctccaaggtctgatgccatccggccctggctcaagtctccatccttcctgccctggcttgccgccctcttcctgtccctaaacaaggcaagctctgagacagaggccaggtgtggggctgaggtggatagagaggcttgccgctgagctgaccatagccactctcaaagtgtggttcctgctgcttctcagtggcgtcagcatcacctgctaatcagaaactgaaattctaggggtgagacccagggatctgggttttaaggagctcttcaggggattctaatgccaactagaccttgaaaattgctggcttatggctgggcgcagtggctcattcctgtaaccccagcactttgggaggctgaggtgggcagatcacctgaggtcaggagtttgagaccagcttggccaatgtggtgaaatcctatctctactaaaaatacaaaaatttgccaggcatggtggtggccgcctgtaatcccaggtactcgggaggctaaggcaggagaatggcttgaactcaggaggcggaagttgcagtgagctgagattgcgccactgcactccagcctgggcaagagagggagactctgtctcaaaaaaccaagaaacagaaaacaaaaaattaaaaaagaagattgctggcttaaacttggtgcattggtgggggctggggaggaggctggttttcaaggtaataacgtttgatcagtatctcttgcagggaggaggtgaggtgaggcagggccactagtgacattgccctggggacaaacttgcagggactggggaggattctccaaaccaggggagccaggggagggattagggagagttctctgttccaggtcccctcctgagcagatgtcatgataagagatgcctgaatccacccaggcccattgtataggtggggaaactgatcctggagggaggaaggcttttgcccaaggtcagacagctgataatgatgaggacctccagggcttcccagctgctctgagacactgtgcccagaatgttcagtacaagggagttggtgaaatatcagaaagagaaaagcagcccccaatggccaggggctggccttgcactcacagccaggcctccatgctctctctttggatagaagggacttcaggccgggtgtggtggctcatgcctgtaatcccagtacgttgggaggctgaggcgtgcggatcacctgaggctgggagttcgagaccagcctggccaacatggcgaaaccccatctctactaaaaatacaaaaattagccgggcgtggtggcgggtgcgtgtaatcccagctactcgggaggctgaggcaggagaatcgcttgaacccaggagacagaggttgcagtgagccaagatcgcaccactggactccagcctgggtgacaagagtgaaactccatctcaataaataaataaataagtaaacagataaacattattaaaaagagaggatttcataaaacacaatgcatggtgcaagaactggatttaaacaaagaaacaaggacaaacggacaaggttattctttgtgttgccctgagctctctgtaatcatgtctgaacccagagagttcaaaccacaaaaacatgttgttcaaaccacaaaagagatccgtgtcctcctattctgtcgaatacaagtgacactgtttctagacaaaaaccctagttctgggcactcctcatcctcctcactttcaaggtaagagaatcagagtgaccctcttttcctgacagcatcgaacccagagcaaaaccacttttcttatttgttaaaactgcagtaaaataggcataacatacaa[133 bp omitted]ctgcctcagcctcccgagtagctgggattacaggtgcccgccaccacgcctggctaatttttgtatttttagtagagacggagtttcaccatgt[132 bp omitted]tcattctccccatccccagcccttgggaacctctaacttattttctgtctctatgaatttgtctatgttagatatttcttgggagtggactcatacaatatttgtcctggcttatttcatttagcataaatactctctaggttcatggaggttgtagcctgtgccagaacttctttcttaaggctgaagaatattccattgcatggatagaccacattttgttcattcatttgatagacatttgggttgtttcagccttttggctattgtaaaagatgctgctatgaacattagtgcacaaatatttgttcacttccctgatttaaattcttttttttttcctgtttttaaacattttttttagtttgcattcttttaggtataaaagtcactctgttttgaatcctttccaaaattatcaaacaagctcaaatcctataacatttgccattaaaagcaagggcagccgggcgcggtggctcatgcctgtaatcccagcaccttgggaggccaaggtgggcggatcacttgaggtcaggagtttgaaaccagcctagtcaatatggcaaaaccccatctctactaaaaatacaaaaattagcttggtgtggtggtgggcgcctgtaatcccagctactcgggaggctgaggtaggagaatcgcttgaatccgggaggcagaggctgcaatgagccaagatcgcgccggcaacagagccagacaccgtctcaaaaaaaaaaaaaaaaaaaaaaagcaagggcaaaagccacaattcctttcacatcaatctaaaacatcctttcaaacaccctcttactgagaggccccaaaggttccctttgtgttcctccttcttgcaacaagacaataaacccaactttgcttgactactggtgtccctctgatggtcttcagctgatcaacattgacaggtttcaccaagtcagtcttaaaaaccaaccacctgggcatggtggttcacacttacaatcccagcaatttgggaggttgaggcaggaggatcgcctgagcctgggagctggagatcaggctgggcaacagagcaaaaccctgtctctacaaaaaataaaagaaattagccgggcatggtggtgggtgcctgtagtcccagcaacttgggaggctgaggtgggaggattgcttgagcccatgaggtcaaggctgcagtgaccttgacctgttgccactgtactccagtctgggcaacagagcaggaccctgtctcaaaaccaaaaatacaaaacaaaaacaaaaacaaacaacaacctatgctccaaaaccatttctggggaaataatcagattccctacccgttcacctacgaagcccagctagagtctctcgtcttaatctttgccaatcgaatacacaaagttttttttttttttttttcacagagtctcgaattgtcgcctgggctggagtgcaatgctgtgatctccactcactgcaagctctgcctcctgggttcaagcaactctcctgcctctgcctcccaagtagctggggttacaggcgcccgccaccacgcccagctaatttttttgtatttttttgtagagatggggtttcactatgttggccaggctggtctcaaactcctgacctcttgatccgcccgcctcagcctcccaaagtgctgggattacaatcacgagccaccacgcctggcctcaaatatgcaaagttttacatttaatttattttagaaattatagagagggggaccatctactcacatcttatagaccaagaaaactgtgagatcattcctgttgacagcagggccatcatctgctttggtgaataatgtgttcccagccacctaaaagccgaacaaaatgtgcaattatggtaaaatgtttccagaaaggaagcagaatatagatacaatgatggaagaatgccacagtgagatactaagcaaccttttaagagcgtgcagggaacttgtaaacataccatctatttgttttataatttatttatttatctatttccaagacagggtctctactctgtcgcccaggctggagtgcagtggtttgatcatggctcactgcagcctcgaattcctgggctcaagcgatccacccccctcagcagcccaagtagctgggactacaggtgcataccaccacacctggctagttttttgtttttttttaaaatatattttgtagcgataaggtctcgctatgttgcccaggctggtctcgaactcctggcctcaagtgatcttccccccttgactcccaaagccctgggattacatgcatgagccaccatgcccagccactatttgttttgtttcagtttatatttatttatttatttattttgagacagagtttcactattgttacccaggctggggtgcaatggcacgatcttggctcatcacaacctccacctcctgggttcaagcaattctcctgcctcagcctcccgagtagctgggattacaggcatgtgccaccatgcccagctaattttgtatatttagtagagatggggtttgtctatgttggtcaggctggtctcgaactccctacctcaggtgatccacccacctcggccttccaaagtgctgggattacaagcgtgagccactgcgcccggcagaactttcttatatttaaatgtctatcttcacaaaatagtaccagtgagcttgttcatctgcttatgtctttattggccaaataaatagccacggtgcaaaatctctgtggtcactactgtgttcccagcatgtcctgtagatgaagccggacaatgtgtgcaatgaggaatcattgctggggatgctgctttctacaatagaactctaagtagcaggtgaaaacaatgagcgaggcccgtggtaacaatgtctacgttttattgaattttgaaattggttgcatgagtcatttctttttctttttttttgggagggggccggagtctccctctgtcacccaggctgcactgcaacctctgcctctcaggttcaagtgattctcttgtctcaacctcccaagtagctgggattacaggtgcctgccaccaggcccggctattctttttgtagttttagtagagacggcgttctgccatgttagccaggctggtctcaaactcctgacctcaggcgatctgcccgcctcggcctcccaaagtgctaggattacaggcgtgagtcaccgcgcccagccttgcatgagtcatttttagctccctggatcatgagccttgtcaatctccttgacccctgaacccatgtgggtcctgctatgaggagatgagggcagccaggggtctgacacagcagatgcatctctgagggacctgacttgtgtgaaccaaggtaatgggtcccctgcatacatcagtagcagtccatggaaatgtccatcagacctgtgtcccctcctggttgggggagcaggaaacttcaagaatgactagtaggggccagagtggcctcaaaggaccaaagaggaggctgtggggtcatccaggagagagggatggtgactggacaaggcgggcagcccgggagccgggaggagtgggtagactcgctggcattgatcatgtggggccccagccctgggaaggaataaggatgactcctgggggctggctggcggtgcctctcctgagatggggaccccaaccacaggtcatgatgttgactcccccgatcccatgtggaataccacctcgcctgggctagggcccatgagggtgaaaccaaggctgtgttgtccactgaggttccccagctcctagcacagctcagcaggcagtacctgatcagtgatgagggattaatccaccattcaactcctccagggggcgggactgcagggcagggtgggaaacggagggtcctggcagggtgggccagggtgggcacagcagagaagtgatttaagagccaagcccttgtcagtacacacttgtgtttgggaacagatcaggactcaggatgcaagaccctggtcatctccaaggtgagcagggacagaggtgtgaggggcctgggctgatcctgtggctgaggctgcagagtgcaaatctgggcagccagagaagggctgggcctgtgcgggcggcttcctgtcctgcagacgggggagaacttagtggtgtctgggaaatgaaaaatcatgcagctgggcgcagagtctcacgcctgtgatcccagctctttgggaagccaaggtgggaggatcacttgagcccgggactctgaaaccagccgagccaacatagtggagacccgtctttagcaaaaatacaaaaattacccaggggtcgtggtgcacacctgtggtcccagctactcgggagactaaggcggggggttccttgagcccaggaagtggaggctgacttgagccgtgatcacatcactgcactccagcctgggtgacagagcgagatcccctccaagaaaaagaaagaaggaaagaaattaaaccatgcagttgagtggagcagaggactgggcaggtggcggctcccctgcaagtgtcagggtccctataacccttggatgggaggggacggggcagctggggagggctgagcaggcctgaggcagccccgtctgctccgaggtgaggcgcctacgctgcctgccttcccaggagctgttatcgcgcccatttcctagatgtggaccctgaggcccagagaggtgcaaggtctggtctggataccaggctgctatccgcggtgccgccccagcccacactgcctgggctcctggcctggcgcaggggacggggtccctaggggggctgggggctgcctgggggtttctgtgacctgtttccctcccacccccaggccctcccctggccctggaccctccaaggagacagcggcaggagcgcacggtctacactgaaagccagcagaaagtgctagaattttactttcagaaggaccagtacccgaactacgaccagcgactgaatctggcggagatgctcagcctcagggagcaacagctgcaggtctgacccccacccccaccccgcccgccccagtcaccccaaggagcctccccaccgctgtcactcaccggggcctggcccgcccgaccacctcccgccctgccacgcaaggggtcccgccagtgtagacccgggctgcatcctgagtcctgttccaactctatgctagcccaaactcgcccacatgatcggcccaggctgtcccccacggggtctcccggtgcccggacctcaggcacccgtgagaacccgcggtccctcccctggaaccctccctggccccccgggcacctgggcggcagacccggctcctcccctcccaccccaccctcctccccctactttcccctccctcttccctcccttctccaggcctgggagccgggggccctcatatggtgggtgcggggtgggggtgaacaccgggagagttttgaggccggcgccgcccccgagcggctcacccgggccgcgcgagtccctccttcacaccttctccctgtcccctctgccccccaggtgtggttcaagaatcgccgcgccaaactagctcgggagcggcggctccagcagcagccccagcgcgtccctgggcagagaggccgaggagcccgcgctgcgcccctagtccctgtagccgctgcctccttccctgggggtcctgagttcccgcagggcaggggttcctggatctcccctcagccgggcccctggggagtcctcccagcagcagaaccgaagatctacagcctcccccggacctggggtggccctgagtgtggaacacaggagggcctcaaggctgtcccggctccaggccctggcccaatcccagcccctatcccaggcccagcccagatcccaggcccagtcccaggcccagccccgaatttaggcccaatgtcaggcccactgtcagtctcgatccccggtccaataccagcccccatctcttgcccaggcccaatcccagacccagtcctaggccgaaccctgatgccaggcccaggatcactcccaaccccagccccaggcgccttgtggcctcagagcccctatgcctccaacttgtcgccagacacccagttataccctgacttcaccaagctgctcccgctcctagaccggttcgaggaatcctcactctccaccacgacgtctcagtacaaagaggaggatggcttcgtggacaaaaatcactcagtccccaggtcattactggatttatagggggcctgtgcctgcaaagttcttcagatcccagagggcctggagtggctgatctacactgctggtgactttctgcagtgaatgcatcaccctttacccaccctgctgcaggtggacatttgctgtcttcactgtgcagccatcacaggtggctctgctgtgaatgtgcctgcctgtcatttgaattgagcctgagcgtttctctgctgagactggagtcgctgctcactgggatgtttggcattagtggatgccgcttgagagctttgttaagggcttttcccagccctccttctggtcaatgtcctccccaacactgaggcttgtgagactttttaatgtttgtcgatccagtgacttgtggttttgttgtggttgtaatatccatttccctgatgattgagagattgagaaattctcatatgggtattaggcattttcaaatagtgactatttttcgtttttttttttgaatattttctcatttttattaaatagtgactattcatggtctttttggcccattttttgtagttgatttctttacaaatgtttataattttttttttttgagtcaaagccttgctctgccacccaggctatcgtgcagtggcacgatcttggctcactgcggcctctgcttcctgggttcaagtgattctctagagtctcagcctcctgagtagctgggactacaggtgcccaccaccgtgcctggctaattgttgtatttttagtagagatggggtttcatcatgttggccaggctggtcttgaactcctgacctcaaagtgttccgcctgcctcagcctcccaaagtgctgggattacaggtgtgagccactgtacccggccacgatgttttaaaataaaactccattgggagttaatattctgcgaggatctcctattatgtggttcgtcttcttgcttttgttaagtagatcactgtgcatagcattcaaaacattcatcagcagattcattcttcagtagaagaaaaaactcaatttaaaaatcagacttgatggacaaaaactgttataaaagtttattttttttttgagacagggtctcactctgtcatccatgctggagtgcagtggtgccatcttggctcactgcaacctccgcctcccacgttcaagtgattctcctacttcagcctcctgacttgctggaactacaggtgtgggccaccacacctggctaatttttgtattttttgtagagacaaggtttctccatgttgcccagacttgagctttcaagtttcttcaagaaaattgttggaattttaattggaatgacatgaaatttagaagtgtttttgggagaaattgaaatttttacaaagtctagtcgacctagtacttatttatattcattcaatcggtgttttac[140 bp omitted]ttgccccggcctcctgagtagctgggcttactgggattacagtagcacaccaccacgcccggctaatttttgtatttttagtagagatggggtttcaccatgttggccaggctggtcttgaactcctgacctcaggtgatccacccccgtcggcctcccaaagtgctgagattacaggcgcgagccaccgtgcctggctgaaatgttattatttaatcacagagctcttgcatgcatctttctgtagatttatttcttgcacttcatttttattattgtctgatattttacatggtattttaaatttcttattttaaaaaaatgtttgtcttgcacatagaattcagttgatctgtttattttgtttccaggaacctagttcaattcttttgaattctcataacttagctggacattgtaaatttaaaaatgaataaaacttcatggttactttgtggacattgattgctgctaagccgacgagtgcctctcctcagcactccacacccctctccgcgtctcgcttcctctgccgccccctagtggccatcctggccctgggtctccccacagcgggttctctgaccctgcctgtcctggtcccgtttagcaaatgctctaatcctcttaggccaggccagcctcagcaaagcagagagagaattagatcagatgttgggggaagggaggacggctgtgcgtgtgtgcgggggacagacttccaggatgtaatgaaagctcctccttatctagccgaccctggtagtaaaatacacacaaaaacaccggaacttcacaccagtcagactctgacagtgtgggaagagtagggaggaatctaatccatctattgtaggcgagggagcccctgtggacattctgggggcatgggggagaggtggtccagtctgactgtagattcagaatcacatcctgggcctaggggagggacggtggtgctccagggccctgcaggcatatcaatgaatggaaaatggattagtttattaatgaagatggaatttgcatgtgccctgattagctgaatagaaagtgaatggattaagtagaacagaattcctctctttttcatctcctcaattcttcttttttttggatacaggatttcactctgtcacccaggctggagttcagtgacgcgatgtcagctcactgcaacctctgcctccccggttcaagcgattctcctgccccagcctcccgaggagctgggattacaggtgcccgccaccacgcccggctaatttttatatttttagtagagatggggtttcactatgtttgccaggctggtctggaactcctgacctcaggtgatccacctacctcggcctcccaaagtgctgggattacaagcatgagtcaccaggccgggccacggattagtttgttaatgaatgaagatggagtttgcacatgccctgattagctgaacagaaagtgaatggattaagtagaacagaattcctctctttttaatctcctcaattcttcttgtttttggagacagggtctcgctctgttgcccaggctggactgcagtgatgcaatctcggctcactgcaacctccacctcccaggttcaggctattttcctgccttaccctccctagtagctgggattataggggctagccaccacgcccagctaatttttgtatttttagtagagatggggttttaccatgttggccaggctggtcttgaactcctgacctcagatgatccacccacctcagcctcccaaagtgttgggattacaggcatgagccactgctcctggcctcaattcttttttttttttttttttttggagacagggttttgctctgtcacccaggctggagtgcagtggtgtgatctcggttcactgcaacctccgcctcccagtttcaagcaattctcccacctcagcctcctgagtagctgggactacaggtgcatgccactgtgcctggctatttttttttttttttttttgataaagacagggtttctccatgttgctgaagctggtctcgaactcctgagctcaggcaatcctccagcccatgtctcccaaagtgctgggaccacaggcaggagccactgcccccggctatatcttctccattcaatttccctcctttttcacccaagcaagcagcccccttcactccctttggaaaccgaaaattccaagggaattttaccatctcctaggaagctctcccgcctctcctcatcatcccaggctgtgttctgggcatccccaagggaagcatctggacttctcactggaccaaggaagaggggacgaggtgacgttcagaaggcgggccttcgaaattccccatgtctgtcttggcaagagcaagaatttctcttgttttcctgcctgtagccaaaaagcataacaagaaaggattcagggtacgtatgagaacagttcattgtaccttcgacaaatgggtcaagttcaagctaatactgccctgcatgctccgggatggagatggaggcagtgcaggtagaaatgtcattgtcttgtaaggatcagagagagggggaaaagggccaattttttttttttttgtagagggagtctcactctgtctcccaggctggagtgcagtggctcgatcttggctcactgcaacctctgcctcccggattcaagcgattcccctgcatcagcctcctgagtagctgggactacaggcgcctgccaccaccaaacccagctaatttttttatttttatttttattttttgagatggagtctcgctctgtcacccaggctggagtgaagtggcgtaatctcggctcactgcaacctccacctcccgggttcacgccattctcctgtct[134 bp omitted]agcctcccaaagtgctgggattacaggcataagccaccaagcctggcatttttgtatattttgtagagacagggtttcaccatgttttccaggctggttttgaactcctgatctcatgtgatcctcctgcctcagcctctcaaagtgctgggattacaaagtgtgtgagccactgtgccaggccagaacctcttgctttaacaccctgcttcatcctaggtctctggatctagtttctgattttcttttttttttttcgagatggagttttgctctttttgcccaggctggagtgcaatggcacggtctaggctcactgcagcctccacctcctgggttgaagtgattctcctgcctcagcctcccgagtagcttggattacaggcgcctgccaccacgcccagctcattttttttttttgtaattttagtagagcagggtttcaccatgttggccagactggtctcgaactcc[133 bp omitted]caggctggtgtacagtggtgtgatcatagctcactgcaaccctgaactcttaggctcaagcagtcttctcatcccagcctccctagtggctgtgcctacagccatgtgccaccaagccaggctaatttttaatttttttcctgtagagatggggtcttgctatgttgcctgggttggtctcgaactcctgggctcaagctatcctcccatctagcttcctaaagcattgggattacaggtttgagccacagcacctggcctgccccatctcttaaaaaaaaaaaaaaatagtgaggttggtggggtggggcaccagtatgttttaaagctctgaggcaattccagtgtgcaaagcttgagtactgctgttctcagtcaaatccctgccatggagtagacagactcctgggagttgatgcctaactgtcattattaagaagacaccaaagccagctgtggtggctcatgcctggcatcccagcactttgggaggccgaggtgggtggatcacctaagttcaggagtttgagaccagcctggccaacatgatgaaaccccctctctactaaaaataaaaaaattagcagagcatgatggcgggtgcctgtaatcccagctactcaggaggctgaggcatgagaatcgcttgaactggggaggtggaggctgcagtgagccaagattgcgccactgcgctccagcctgggtgacagagcgagactgtctcaaaaacaaacaaacaaacaaacaaaactattttagtaaaagaaaactcaaaattgccttatctgattgtccctttcacagaaatccacctagataaaatcaaatgccataaagagaaagatgtgaatggtcattattttatttattatttatttatttatttttgagatggagttttgctgttgttgcccaggctggagtgcagtggcttgatcttggctcaccgcaacctccacctcccggttcaagtgattctcctgcctccgcctctcgagtagctgagattacaggcatgagccaccatgcccagctaatttttgtattttcagtagagacggggtttctccatgttggtcaggctggtctccaactcccgacctcaggttatctgcctgcctcggctcccaaagtgctgggattacaggcatgagccactgtgcccagcctgcgaatggtcattatttttataccaaataaatatagtagccaccagtaaattcattagttaaaaagggttttcagctgggcatggtggttcacgcctgcaatcccagcactttgggaggcctaggtgggtggattacgaggtcgggagatcaagaccatcctggctaacacggtgaaaccccgtctctactaaaaatgcaaaaaattagccaggcatggtggcgggcgcctgtagtcccagctacttgggaggctgaaggaggagaatggcgtgaacccgggaggtggaggttgcagtgagccgagattgtgccacttcactccagcctgggtgacagaaattctgtcttaaaaaaaaaaaagggttttcaaggccaggtaaggaggtggctcacgctttctaatctcgggaagccgaggtggaaggatggactgaacccagaagttcgagactggcctgggcaacatagtaagaccccgtctctacaaaaaattaaaaatttggccaggtgtggtggcactacctgtggtctcagctacttggaaggctgaggcaggagggaggatcacttgagcctgggaggtggaagctgcagtgagctgtggtggtagcactgcactccagactggatgacacagcaagaccccgtctcaaaaaaaatttttttccagactcccattttaacagactgtttctgccgggtgcagtggctcacgcctgtattcacaacactttcggaggccgaggagggtggatcacttaaggtcaggggtttgagaccagcctggccaacatggtgaaaacccgtctctactaaaaatacaaaaattagcctggcatggtggctggcgcctgtagtcccagttactcaggaggctgaggcaggaggatcgcttgaatccgggaggcagaggttgcaatgagctgagatcgtgccactgcactccagcttgtacgacagagcaagactccatctcaagaatatcccccaaaaacaacaaaaaacctcagactgcttccctgaaattcttctaaagaaaatgcctgacaggaaataacttaaggatattgtgggtttttattgttgctacttcgagatgcagttgtatctctagagacacagtggggtcagatcagagatggggttcattcaggggcacccccagaactgggagagtcctcggcttccacatacccgttatggtgctccgtggccaccagggggcaacaatacgtcactgttccagcccagggagcggccaaccagagcttggacctggggtgtcccaggagccacctagaccggctggttccttccatacaaaagacctccaggtgggatgggggagagacaccccacattcgagtgggagaaaaacatggaaaagacacagaggcaacattatatttctttccacttgtgtaatttaagctaaagccaaacagctagaaaatatactttttttttttttttttttggagacagtcttgctctgttgctcaggctggagtgcagtgataggatcataactcactgcaagctccgcctcccgggttcaagccattctcctgcctcagcctcccaagtagctgggactacaggcacccgccaccacgcctggctaatttttgtatttttagtagagacagggtttcaccatgttggccaggctggtctcaaactcctgagctcaagtgatccacctaccttggcctctcaaagtgctgggatcataggcgtgagccaccttacccggccttcttgttgtggttttaatttatatttctctagaggcaaatgatgcaaaacatcgtttcatgtgctgatttgccatccctgtgtcctctttggtgaaatgtttgttcaaatcttttattcttttttttcttttaaaagattatttgtttaatgctgggttttaggagttctttatgtattctagaaacaagtccattgccagatatgagatttacaagtacttcctctccatctctggtttgtcttcttgttttctcattttgttttgagatggagtctcactttgttgcccaggctggaatgtagtggcacaatctcggctcactgcaacctccgccaacacatctggctaatttttctatttttagtagagacagggttttaccatgttggccagacttgtcttgaactcctgagctcaagtgatccacctgcctcggcctccgaaagtgctgggattacaggcatgagccaccgcacctggcctatcttttcattctctttataggttctttggttcttttgcggaacaagactttagtttttttattttttatttttgagatggagtctccctctgttgcccaggctggagtgcaatggtatgatctcagctcactgcaacctccatctcctaggttcaagcaattctcatgcctcagcctcccgagtagctgggattacagacatgtgccatcatgcccagctaatttttgtatttttagtagagacagagtttcactatgttggccaggctggtctcaaactcctgacctcaagtgatccgccctccttggcctcccaaagtgctgggattacaggtgtgagccaccgcacctggccttatgaaagttttagaagcctccataaacaccgtttattgtatatggtttaacaacacagagtaagaggataaaattagattgcaaattacactccttaagatcagagcaataataaattgtggagatacatgtgatgaaaagaaatggaaccttaattgctcctgtaattttatttcttatttttattactaatttttgctctaaaatctgtcactgtagctatttcttatttttattaacaaacatttagacatccttttaggtagtacgtacattattcttgtagcattctgtaaacgggaaacattgcaaacatttaaaaaagtctgggatcccatgactcaactcactgcaacctttgcatccctgggctttgaaccctggttctctgaaccctagtcacttctttctttttgagacggtctcgctctgtcacccaggctggagtgcagtggcgcgatcttggctcattgcaacctctgcctcctgagttcaaacgattctcctacctcagcctcccgagtagctgggactataggcgtgcaccaccatgcccggctaatttttgtatttttagtagagatagggtttcatcatgttggccaggatggtctcgatctcctgaccccgtgatcctcccccacccccccgacctcccaaagtgctgggattacagacatgagccaatgcgcctggctaattttttttggtttttgtatttttagtagagatggggtttcaccgtgttagccaggatggtctcagtctcctgacctcgtgatccgcccgtctcggcctcccatagtgctgggattacaggcatgaaccaccgtgcctggccaaccctggtaacttttaacaaggaagggatcagagatgcagaggtttgatatttaaggtttcaggataaaataataagtcttacacaatgaccccagtcaggtacatgtacaaggacaggagaatcaatgtcattctccatataagatccagagtgttttggacgttattcccatgggaacagctctcgaggaagatctgccatcttctcttggaacaatttatcaaagtcttcagcttgggccactgtgaagtgatttttccagtccccagatacacctggaaacaagaagcagaaactcaggtcagaccacacatctccttgacctgtctccaccaggcacctgacatggacattgtagctaacatagcagaatggccgatggttcgtggtgggcctttatcctgcctggtcacatagttattcacctagctggaaacaatttcctattttctcctttctcccatccatcctgtgtacaattcctcagcaataacgccagtatatcatctgatatgtccagaatcaagtcacgtctcaccacctctgtttctaccacgttgactcaagccaacatcatttttcacctggattattagagtacacttgtaactggtctctgcttttttttctttttttttttgtagagacggagtcttgctctatccctcaggctggagtgcagtagcgcgatcttggctcactgcaacctctgcctcccgagttcaagcagttctcgtgcctcagcctcccgaatagctgggattacaggtgcctaccaccacgcctggctaatttttgtatttttagtagagatggggttttgccat[138 bp omitted]cagcatggcagccctcatgatcccagatcatgccacttctctgctcagattttccgaggactctaggtttcactcaagtacaagtgctggaggcgcttacagggctccaggtgatccagcccctgtggcttctctgagctcatcccctaaaactaccctctccgtcactctactcacacggggacttctgattctgcctcaaacgtggcaggcatccccactcctcagactattggcgtcccacgctccttctccttggaacgctgctctctcagattggcccatgacttgcctatttgcctctttcaagtctttattccaattcaagtttctcagcgaggttctctctcaccacccaatttagaggtcactccccatccttgctgtatttcgcctcataacacatatcatgtaggacaggttctgtgtattttctttctgtggtgtatgtgtatggtatgtatccctaatatagataagttatacaaagtctcagcatttatctttttttttttttttgagatggagtcttgctctgtctcccaggcaggagtacagtgttgtaatctcggctcactgcaacctctgcctcctgggttcaagcgattctcatgtctcagccccaccccaagtagctgggactacaggtgggcgccaccacacatggctaatttttgtatttttagtagaaacagagtttcaccatgttgccc[132 bp omitted]aaggatttaattcttttcttccacggaggactgtcccagatgtattagaactgtaggattttggaaaaatggatttttgttttgagccggagtttcactcttgttgcccaggctggagtgcaaatggcaggatctcggctcactgcagcctcctcctcccaggttcaagtgattctcctgcctcagcctcccgagtagctgggattacaggcgcccaccaccacacttggctaattttttgtatttttagtagagatgggctttctccgtgttagccaggctggtcttgaactcctgacctcaggtgatccacccgccttggcctcccaaagtgctgggattacaagcatgagccaccacgcctggccctggaaaaatggattctttcaccccatgcaatagacatttccattcatcttggcaccttacagcgtgtgatagcaaagtctctcttctctcccttttccaggtgaggcattccttcacacatttcttcatccaggacagatctctttttttttttttttttttttttttttgagacggagtcttgctctgtcgcccaggctggagtgcagtggcacgatcttggctcactgcaagctccgcctcctgggttcacaccattctcctgcttcagcctcccgagtagctgggaccacaggcacccgccaccatgcccggctaattttttgtatttttagtggagatggggtttcaccatgttagccaggatggtcttgatctcctgaccttgtgatccgcccgcctcggcttcccaaagtgctgggattacaggcatgagccaccgcacccggcccatccaggacagatctctatgctaactcaccagtggggcagctgcactgtggccatccccaaccccgtccttgtcctcatttctcaggtgaatcacagcttgtaggtctagcaagggttgctagttaacctgctcactgtctgtagaatggataatgctcatgtcacattctgaggaaagagaatctgaatgacctcacgtaagtcagataaccttcccgggcggaaccaattttccccacccacctacagcccacatcagtaccacaagaagaggctccctgctgaggccacgggagaagtgttc[132 bp omitted]aaaccatgtctttactaaagatacaaaaattagctgggtgtggtggcgtgtgcctgtaatttccagctactcgggaggctgaggcagaagaatcacttgaatcctggaggcggacgttgcagtgagctgagatcgcaccactgcactccagcctgggtgatagagcaagacttcatctcggaaaaaaaaaaaaaaaaaaagcactctttcatctcaactgttagcgcccagttgtgaccataggcatgcatgccgtgtattctggtatatttggaaaccagaggattttcttttaccttttctcagaagttgtgctttgtccactacataatcaacactcaggagggaataattggacatcttgttttctttcatgctctgaaaggagctgttcttgagaattaagttcagttcttcgggttctaacgtctttcccaggaattgacagatcttctctatggttcttcctgtgtcctaaaaaagaaaaatcaagagagaggatacgaaagagaaagacaaggctgggcgtggtggttcacgcctgtaatcccagcactctgggaggctgaggcggttggatcacttgagatcaggagttcgagactagcctggccaacgtggtgaaaccccatctctactaaaaatacaaaaattggcagggtgtggtggtgggcgccggtaatcccagctactcgggaggttgggggaggagagttgcttgaacccaggaggtggagggtgcagtgagctgagatcacgccactgcactccagcctggtgacagagtgagaccttgtcaaaaaaaaaaaaaaaaaaaaaaaaagacaatagaaaaaagtaagatgagaaggagggaaccgcagaatgaggaggaggaggaagaagagaggaacaacatgcagatgtgagaagggattgagttgaatgcaattaggagaaagaaagaaaaaaggtaaagaagagagggcatgaagtatgtaaaagatgcaaggatgggttgggcgccgtggctcctgcctgtaattccagcactttgggaggctgaggcaggcggatcacttgagtccgggagttttagaccagcctgggcgatatagtgagaccctgtctctacaaaaaatacaaaaattagccaggcatggtggcgcacagctgtggtaccagctacttgggaggctgaggtgggaggatcacctgaacccaggaagttgaggctgcagtgagctgtgattgcaccactgtactccagcctgggcgttggagtgagaccctgtctcaaaaacaaaacaaagcaaaacaaaacaaaacaaaaccaaccagaaaaccacaaaagatgcaaggatcatcgtggattttcccgtatggtagagtttaggacaacttaacagtaaaacacagagcctcgggtttcctaagagacgtttagagaggcttctagacagtaattagggttagcaaggagaggttcagggagaatctgatggagattgaaggcttgatttcaaatcctggctgtactgtcagatagtactgtttcccataactagcttttgaataacacacagagttttacaatatcttcttatatttcatctcaataattaggactaggtacatgatcctgggagattaatagatttttatttttaaaattttatttatgtatttatttagagacaagatctcactctgtcgcccaggctggagtgcagtggcatgatctcagctcactgcaacctccgcctcccaggctcaagcaattctcctgtctcaacctcccgagtagctggggttacaggcgtgcgccaccactcccggctaatttacgtatttttagtagagagggagtatcaccatgttggccaagctgggttccaactcctgagctcaggtgatctgcccacctcagcctcccaaagtgctgggattatggatgtgaaccaccgcacctggccaacaaaatggattattgtaaccagaaggactttgctttgaatcataggccttactcttagatctataatgctttaattttttcctctatttcataaaccttggttatctaataagaagatgtacaactatggaaataactaaaataagttcattgtgtgatccgaaaggaagatcccaggaaggtatgggatcgtgtatctgaggtagccaaccaaacttgttacaaagggcttcttaacagaaatgaaattcattccagcttggtcaacgtggtgaaaccccatctgtaccaaagatacaaaaattagccaggtgttgtagtgcatgcctgtaatcctagctacttgggaggctgaggcacgagaatcacttgaaccggagaggtggagattgcaatgaactgagattgcgccactgcactccagcctgggtgacagagcaagactctgtctaaaaaaaaaaaaaaaaaaaaagatggccgggcgcggtggctcatgcctgtaatcctagcactttgggaggcctacgggaggattgcctgagctcaggagttcgagaccagcctgggcaacatggtgaaaccctgtctctactaaaaatacaaaaaaaaattagctgggcatggcggcgtgcatctgtagtcccagctactcaggaggctgaggcagaagaatcgcttgaacccgagaggcggaggttgcagtgagccgagatcgtgccactgcactccagcctgggcgacagagcaagactccacctcataaaaaaaaaaaaaaaagaaattcatgcccagaccataggccatagaggattggagaggatgagccagaggaaggtgttgggacgtgacgtttcccaggtggtacaaaatccaatgttggtgttattttctcttttatgtgagatatcactaataggtcaagttcttttttttttttgagatggagtcttgctctgttgcccaggctggagtgcaatggcatgatctcggctcactgcaacctccgcctcctgggttcaagcgattctcctgagtagctgggtcctgagtagctgggactacaggtgcacaacaccacgcctggctaattttttatatttttggtagagatgggatttcgccatgttgcccaggctggtatcgaactcctgacctcaagtgatccccctactttggcctcccaaagtgctgggattacaggtgtgagacaccgtgcccagccttctttttctttctttttttttttttttgagacagggtctcattctgttgcccagcctagagtgcagtggtgtgatctcggctcactgcaacctcttcctcctgggttcaagtgattctcctacctcagcctcccaagtagctgggactacaggtgcctgccaccatgcccggctaattttttgtatttttagtagagatggggtcttgctatgttggccaggctggtctcgaactcctggactcaagccatccacctgccttcacctccccagtgctgggattacaggcgtgagccactgagcttggcctcaagttgttctttcaatacttgctggttctgagtatcatcggacagcttttcctctccgtcactattcactccagtacttggatctcagaatagtgagataaattgattacatgccttcatttctgttcataccagccaagctgagatgtcagacactcggaaccatctcaggaactaaatcacttctacccagtcccatcctctcttccagcgccctctcaacgcttggttatcagcagcaccataggtctcacccagagaaatgtttacatacaccagtgctagcaggagacatcacactctgcctcaatgcatggaatatgctccttatttttatttttagagccggcgtcttgctctgctgccccaggctggagtgcagtggtgtgatcatagctcactgcagccttgaattcatgggctcaagtaattcccctggcctcggcttcccgagtagctggaattagaggtgtgcaccccccacatctggctaattttttttttcctttgtagactggagtcttgctgtttcgtagactggagtcttgctggtctcaaactcccagcctcaagtgattctcccacctcggccttccaaagtgct[132 bp omitted]ctcactgcaaactccacctcccaggttcaagcgattctcctgcctcagcctcccgagtagctgggattacaggcgctcgccactgcacccggctaatttttgtatttgtagtagagatggggttt[133 bp omitted]agcttgggcaagggtcaaccagaaacagggcaatgaagaccagggagttaatcctgctctttgtgactcttcaccaggctccactttaactgagagggtggaatgaagacacagcgggatggagggaatttaaggaaagtaaggatggtggtgagagggtgtgcactgactctaaaaatgatgggattacctgtttcagctcctcataactcagtaacaggaagtttttctcctctctcatgggcatccagccatgaatgtggtcaaaccatgacccatatagcactgcatggggtggcagaaaaagtgataggttacaaattttatgagagcaggcatccagtctattatgttcatccccccaccggcttgttaacgtatgattgacaaataaaacttgaatgaaacttggtcgaaggggaccaacaaatggtatatatttacagtatataacagatgttttgatgtacgcatacactatggaatgacagtgtattagtcagttttcacactgctgtgaagaactgcccaagactgggtaattcacaaaggaaagtggcctaattgactcacagttcagtgtggctgggggagcctcaggaaactcacaatcatggaggaaggggaagcaaggcaacttcctcacaaggcggcaggagggaggagtgagtgccagcaggggaaatgccagccacttataataccatcagatctcaaatgtggcatgtatacaccatggaatacaatgcagccatgaaaaaggatgagttcatatcctttgtagggacatggatgaagcgggaaaccatcattctgagcaaactatcgcaaggacagaaaaccaaacaccacatattctcactcataggtgggaattgaacaatgagaacacttggacacagggtggggaacatcacacaccggggcctgtcatggggcggggggagggggagggatagcattaggagatatacctaatgtaaatgacgagttaatgggtgcagcacaccaacatagcacatgtatacatatgtaacaaacctgtacgttgtgcacatgtaccctagaacttaaagtata[174 bp omitted]gatggcgggcgcctgtagtcccagctactcgggaggctgaggcgggagaatggtgtgaacctgggaggcggagct[134 bp omitted]tcactgtcatgagaacagcatgggggaaaccactactatgatccaatcacttcccaccaggtccctcctacaacacgtggggattatggggattacaattcgagatgagatttgggtggggacacaaagcctaaccatatcagacagaatcaagctaattaacatattcatttcctcatatacttaccattttttgtcggggcggtgagaacatttaagatggtctctcttagcaattgtcaagtatggaatacattattattattattattattattattattattattattattgacacagagtctcactctgtcacccaggctgtagtgccatggagtgatctcggctcgctgcaacctctgcctcctagattcaagcgattctcctgccttagccttccaagtagctgagactacgggcacatgccaccacactcggctaattttttgtatttttaatagagatagggctttgccatgttggccaggctggtcttgaactcctgacctcaggtgatccgcctgcctcggcctcccaaagtgctgagaccagaatgaagatattaatcaagatggtaggacttaattaataattagagataggaaagtggtgaggggcctaggggagtgggatgggaaaagagaatgcttatgaaatattagactcatgctagtctttgcatgaggggtggagtaagataaaccccacgcagttaagaaaggtgttcaaatgtttttatttgagatggagttttgattttgttgcccaggctggggtgcagtggcgtgatcttggctcactgccacctctacctcctgggttcaagcaattctcgtgcctcagcctcctgagtagctgggattacaggcacccaccaccacggccagctaatttttctgtatttttagtagagacagtttcattatgttggccaggctggtctcgaactcctgaccccaggtgatccacctgcctt[131 bp omitted]gcctcggcctcccatagtgttgggattacatgtgtgagccaccgcgcccagccagaaaggtgttcaaatttgagtgtactgaattagaggcattggtggctctctctaatggaggtatctgtagctggtgtattgcagagagacacatcacagctgagatagaggctcatagagttttgagatcaattgcaaaatggaaagtactgaaaaagcccaggaattctgcataactaaatatatagcgatcctagagtcatgcaatcagttctgagacagatagaaacagaatattaagagggttttggaaagaggcatcagaaaaaaatggcggaaggtcaggattgtgttgtcccggaagccagtgaaaagctaacttccagacatctagcattaggagactagaggagaatataagtttcctgtgctagtattggaggctctagagacttagaaaatagctaggatggtttatcatggggcaagctgaggggccggctagagttctgctgctatgcgggagagtaagcgaacttagcaggtttggcctccaggggtggtggagcctttcaacccatgggttggtgagatgtagagatgtgaggctgggtgtcaaaagaggtcggctagaagactccaagcacccccatattttgtgaaacactcaccagttccttgacaaaaccattcaaaatattcttcccatgactttggtttcttaataaacttcatgtttttccagaaaaaataaccagacaccaaaacatctctgggatttctcatgagataaatcaccttaaatggaaaaacgggagaatgaaaaatcaatacagtcaatcctcactctttttgatcttcacaaaaatggagaaaaagccaattcctggataatgcctaataatatcaatggattcttttaacaaattacttactgcactcactaatcaaatttgatgtgcctatgaagtagtcactgcactaggaatatatcaatggaagaaggaagcatcgttccttccctctgggatattacagtctgctcacaatgggaagaacatggaaggtttccaaaggtgagtgatgtatatttgtgtactatggtttaaagatcattaacaggagaatgaattcataaattaagctacattcatagatatatagcaatattatccatatacaacacccaagatcatggacacatttcagagacattactttgtcctttgggccaggcatggtggctcatgcctgtaatcctagcactttgggaggctgaatcactcgaggtcaggagttcgagaccagcctggccaacatagtgaaaccctgtgtctactaaaaatacaaaaattagccaggcatggtggcgcacacctctagtcctagctactcaggaggctggagcaggagaatcacttgaacctggggaggtggaggttgcagtgagccaagatcgcaccaatgcactccagcctgggtgacagaatgagactgtgtctcaaaataataataataataataattcacacacctataaacaccttccaggaaagtacaattctagaagcagtctgagccatgcaaggtcctggatatgccttgtccctcttgtgatcacccctctgccccatgggagatgcatgtggctgctgatatcaacacatatttacacacagtaagacgaagtgtgtacagagcccagtcctggccccggggcagtcaacctggatacaggcattgattgatgaacatgctgcttcccataggaacacctctgtgtcttttctgtggcaggaggcatttgttgaattcagattggctaattattttttagggcaaccaaaggcggttatctagtatataatatggctatacattctgattgcacttagaacctagttttctaagattctgggttagtgttttcaccctatccctggtttaaatctggctggggtaatctgtggaatggtctatatccttgaactcaaggacagttctgggagcagccacataggtgtcacctaatacggaatctcaggtctcaacaacacagacctgttgaaggagaatgcatttcagcaagatctccagatgacttataggcatatcagtgtttgaaaggcactgatcaaacacgtcttaaccattatgcactgaccttggccttggaactgaagaaagacttggggaataactggatggggaggtgggaggagaataaacgtggactctccgtttcactgagtgctgtatacccaatctcactctctacccagggtgatcgctcccagatgggcacagattggatccacttggcatcccccttggagtgcatcaggcagagaatctcagccaaccagtttgttcc[220 bp omitted]gaggcagagaattgcttgaacctgggaggcggaggttgcggtgagccgagatcgtgccatggcactccagcctgggcaacagagtgagactcagtctcaaaaaaaaaaacaaaaacaaaaacaaaaaaaagtaccatctcaaccttaatttttttattatttatttatttatttatttattttgagacagagtcttgctctgtcacccaggctggagtgcaatggcacgatctcagttcactgcaagctgtgcatcccgggttcatgccattctcctgcctcagcctcccaagtagctgggactacaggcgcccaccaccacgtct[131 bp omitted]cactgcgcctggctttttttttttttttttttagcgatgaggtctccctctgtagcccaggctagagtgcagtggtgcaattatagcccactgcagccttgaactcgggctcaagtgatccttgtacttcggcctcctgcttcagcctcgcaagtatctgagacctcaggcatgtgccatcgcgctgggctaattttttgaaaaaattttattgtagagatcaggccttgctatgttgcccaggctggtcttgaacgcttgacctcaagcaatctgcctatcttgccctccc[137 bp omitted]acctccatctcctgggttcaagtgattctcttggtcagcctcccgagtagctggaactacagacgtgcgccacagcgcctggctaattttttatttttagtagagacggggttttgccatgttggccaggctggtgtcgaactcctgacctcaggcaatccacctgccttgacctcccaaagtgctgggattacaggtatgagccaccatgcccagcctgtcaaccacttttaagcctacggtttcgtagtgttaagtgttaagtatattcccagtgctgctcaaccaatctccagaggatttttgtgttgcaaaaccgaaactctatgcagagccagcaccgactccccatttacccttctcttcagcccctggcagccgccagtgtactttctgtttctatggacttgatgactccaggtaccttatgtaagtggaatcacacactatttgtatttttgtgactggcttatttcatttagcataatgtccttgatgtttatctctgttgtatcatgcatcagaattttcttccttctcaaggatgaataacattccattatagctatataccacattttgtttattcactcacctgtcagtggatatctgggttgcttccatcttttggctatttgctgaaatccctcttattatgttcccattgctcttggcctctcagggccatgccacttccaatgtcttcagcctcaatcctcaccgcatccgcagtgctcttaccgccctccacccacagccccactcccagagacatatgatcctcatctttcagccccttgagattgcctggctcttttgtggttcctggccattgccctgatgattctcctatctgaaaatagccctccccccaagtaatttcatactcattctttgcatttccatttaaatgctatttcttctttcaggacatcattggtcatcctcagccatcctccctcccactgccaccaaacaaacacctgaatttgccttgggattcactcctgtggattctcctaataccttagattacccctctgaacactcatcctactgtgtaatttcctgactaaatccttttctctgattgtcaatggtattaggcattcctctcttccccttaaagcattgtacactgtctgacataaaggaagaactccaatcatgcactgaatggacaggaacacaaccacagcctttctcagttcacgattctgcctccttacctgatttggggtaagtcaatattattacatcttcatcccttatcacgaactcatcacgtacttttcttaaggtttcggatctgaaacccatagtagggaaagctatgccttcaaaccataagaaatcgtccgacatgatgatgacctcttcctgcgtggtgtgagggtttcaactgtagccaccgctggaggctgtggcagctacaggcagatcagcttttacagcaaggataaaacgatctttaaccttgtcccagcatgtcacatgtttgttgtaaagtttacttgctgataaagagaggtataatgtgacccatactcaaaagattgaagatgttgagcaatcatgaacttatctagagaccattttaggggtcatctgagcttgcgttcctgagagtgaactgcaagatcgaataacaaacacgaggacaaatattttttttgataatatgggtgaatttatttcttaaggtttgagtgcaaacttaaaaacaagaacaaagcttttcatcaagcataaacacaaaatctaaataatcctgcaatcgtgcattttaacagaaagtacaaatatgaatacattataatttgtaactgcatttaaaaattaaaatatgtctctccaaatccaaaagaccacacagtctttatctgttctcatcttgttaccttagaaacatttgtcatatgctctcaggaaaatataggcaagaattactaatcagttattcacgatcaaagaaacattattctccctgagactttttgaatcatttatctgtatttctgaagtatcacacaattatacctccactctagagaaaaaaagagtaagtacaaatattagcagtgtatatattgtagtaaatttttaaagtacaactttagttgatggctgacgtgtatgtaataattgtgaacaatttaaacggtataaaaatgtgagatgaaaatctttagactcaaatacttgaaaagtcactatgaatatggaaagatttgtttgcataaacatgtatgtttttagatggaaaatcaagaggtagtggcatctccctgtttccttaataatatttggattttcacaaagaattggcagcacccaaccttaagtgttaattatgtgtttgtttgttttttttttttttttgagatggagtctcactctgtcgtccaggctggagtgtagtggcgcgatctcggcttgctgcaagctctgcctactgggttcatgccattctcctgcctc[134 bp omitted]agcctaattatgtgtttctaaaggacctatacaacagatcagttggcagtgttctagctttagggagatgggggtggattgggggtgcaaatatctgagataagataatgcatgcactcacacatttaaaatcaccattctaaatgggaaaaaaaaatcacatattgggaaagtccaagaaactcattcttaagggataaacagcagggcaggagcaaaagctgaatagaagtctacttgataataatgttttttcactcttcaaaggcaagttgggaagaatgagaatactcacatacacataacttcagggaaaacgtgcctagaattttaccttgcaaaaca[222 bp omitted]gaggc[138 bp omitted]tgtttataatacttgatttttcccttattaccaccctgtacatcacatttaagtattttctttataaatattttagagcaaaaagaatttattttgttgcaatggtggcccacatctgtacaaaacaacctaaacaagatatatatgtatatatatatgcatatatatatgcgcatatatatatgcatatatataaaatgattaagaaaaagtgcaaagaataacagtattaagaatttttgcattttatagtaactgtggttcaagcgtgaatatctatcagcgatatataatcccaggttttactttttaattttatttatttatttattgttttgagatggactcttgctcttgtcacccaggttagagtgcaatggcatgatctcgggctcactgcaacctccgcctgctgggtccaagcgattctcttgcctcagcctcctgagtagctgggattacaggcgcccaccaccacgcctggctaatttttg[134 bp omitted]atttaattaaagattcaaaaacaaaccacactccaaattactgcacaaacatcggtcccttatcaagcaagtctgcccttctcctgaatctagtatttccagtttctaaactcttcccaaacaggaaaaaaatatttttaatacgcctcattttttagggcacttttagacttacagaaaaattgcaaagagagtacagagagttcccatagtccatacttaatttggatttccttagtttttatctcatgctcgtgttttttttttttttttttgacagagttctctctttgttgcccaggctgaagtgcagtggcatgatcctggctcactgtctcatgccctttttttgccccaaaatcccatcctgtatagtacatgacatacactcatcctgtctccttgggctcctcttggctgtgacagttgttgctcagactttcctcattttttttttttttgagatggagtcttgctctgctgcccaggctggagtgcagtggcacaatcttggctcactgcagcctctgcctccccagttcaagtgattctcctgcctcagcctcacgagtagctgggattacaggcacgcgccactacacccggctaatttttgcatttttagtagaaacggggtttcaccatattggccaggctggtctcgaactcctgacctcaggtgatccgcccactttggcctcccaaagtactgggattacaggtgcgaaccactgcgcctggccgactttcctcatttttgatgaccttgatggttttgaagaacactggtgaggcattttgtacaatgttcctcctttgggatttattgcaggttttctcatccaacaaatgagttcatgggttttggagaggaaggtcacagaggtaaaataccatgatcatcacaccatatcaaggggacttattagcaacatgacctggcactaatgatgttgaccttggtcaccagaggtcacttgacttttctccctcttccctttctatgtggccatattttaaacataaactctaggcctgaatatattagtgagataacattatatgaaccccaaatgagggacagtctgcaaaatgacgggcctgtactttttaaattgtgaaaaaattttttttttttgaaacggagtctcgtgctcagttgcccaggctggagtgcagtggcacgatctcagctcgctgcaagctctatacctcctgggttcacgccattctcctgcctcagcctcccgagtacctgagactacaggtgccagccacca[138 bp omitted]cctggcctattatttattttattttattttgagatggagtctcactctgttgcccaggctggagtgcagtggtgcaatctcagctcactgcaacttccgcctctccagttcaagtgaacctcttgcctcagcctcctgagcagctgggattacaaaggtgtgccaccatgcccagctaagttttgtacttttagtagagatggggtttcaccatgttggccaggcaggtcttgaactcctgatctcaggtgatccacctgccttgacctcccaaagaattacaggcatgagccgccacgcctggccatacttatatcttttttaaaaagacaaaggatattattatttgacagaaaagggaaataaaaggaccattaaaccatacaattgattattaatcatacctgtaatcagggaaatacaaatcaaaatcacagtaatgcatgtaggttgtcacttcttatacgttagaagaaaaaaatgggatgatactacctgttggtcaggccgttcgaatttgggggatctgttcatttgcatggtggtattggaggagagtttcagaaagtaactggagttgaaacttgcagagatatatgtccttggagacattttcatacatggacaaggaaactcgaaaaaaaaatgtgtatttcaacattgcaaccgtgaaaaatgggaaaccagttgaatttggggatgaatgattaatttaaaacacaggataagttatagaatatgtggaagatgacactatagttgaatgaatgaatgaatgaatgaatgaatgggacttacatctgtcagcctgcacacactcagcacagaatgttagaggaacaggcagattcctaattatgaagagatggtgctcaggccacgttcacaggcacagagcagtggggagaggtgccatgatcgtaaacaccacgggcaggaagttgcagaacaatttcacctctggaaaggggagcagagcagcagactcaggaaagactttagaagaagcctcaattgtgttttgactttctcactggagtctttatctgaagccatagggcaaaatgatagccttaaagagttttgttgacatgcttttcttttcttttttttttttgagacagagtcttactctgtttttcaggctggagtgcaatggcgtgatctcggctcactgcaacctccaccttctgggttcaagtgattctcctgcctcagcctcctgagtagctgggattacaggtaggcaccaccatacctggctaatttttgtatctttagtagagatggggttttgccatattggccaagctggtctcaaacccctgacctcaagtgatctgcttgcctcagcctcccaaagtgctgggattacaggcctgagccaccgtgcccagcctgtttacctgcttttctatatgtgtgagacatttcattataaaatgaatagataaaacctaaacatggctccacgtgggcactggcagattggctgggatgagctcctgagatcttatctccagcatctggtttgggttctttccatgtctggcagtaatctctggagctggaagaatcacttcagctgtggcccagagtgaggcctctgaggagctgatctgggagaagatgtcaatgtccccccagggctgagatcagggctgtggatagtgagagaggaggtaggaagaaagtggtcagacaggcagttagggtgagtccttggtaaaactccttcaaacgaagaacagcctgaaaatccagctgcaggccccagataagaaagagctcacatcagcaaaatttcttcaaatcaagaacagcctgaatatcaagctacaggccctagataagaaacagcccgcgtccttgaatggaaatgcctgctctgtgaacctagataaacaaattccactccttttttggacacattttcctccctttgatgcatgtttgtctcatttcacatgcttcctctggattgatccttacctttcacctattttacatatacttatctttctgtgattggccgtgggcaaaatcctcatttgcataaagtgtaacatcactccagcccctaattggttgcaggccaagccttcacctcagcctctaattggctcttttcactgttgtgtgtctttctgagtggcccacagaccagtcaagcacactcctcccacttcccagtccataaaaccactgaacttagccctgcagccagcaactctttgtcgggtcacctctctttgttgagagcttttctgtcactttcgcttgataaatcccactctgtcctactcagtctccagtgtcaacgtttcttattcttcttggttgtgggacaagaacctggagcttgctggtggtgggagtaaaagaactacaacactccct[137 bp omitted]tctctactaaaaatacaaaaaattagctaggcgtggtggcgggtgcctgtaatctcagctacttgggaggctgaggcaggagaaacacttgaacccgggaggcagaggttgcggtgaactgagatcatgccactgcactccagcctgggcgacagagtgataccctgtctcaaaaaaaaaaaaaaaaattgcccctagttgagaaccactgtcttagatgtaaaagctgttattcagacaaagaggacgggtgaatgctggtgtcatcagcagagagaagggtagagttcatctcctggaggcacatttagaatagatgccatctttcacatgggcacatacttccatttcacattcattctttctaaaagaactagattataggccaggcgcggtg[131 bp omitted]gtggcgggtgcctgtagtcccagctactcagggggctgaggcgggagaatggcatgaacccgggaggcggggcttgcagttagctgagatcacgccactgcattccagcctgggtgacagagcaagactacgtctcaaaacaaacaaacaaaaaactagattataaaattctaaaagcaatcatataagcaatcatgtattttaaagacaattataataatactgccaacaacaagattatgttatttagttttcacagtgaccatgggaagggtaagaaattattttactttattttacagatgatgaaactgagacacacagatcttaaaggatacttttgaacttttaaagtcagtatttcttttgttttctttttttgtttttttgagacagagtttcactctgtctccgaggctggggtacagcgatgcgatctcggctcactgcaacctccacttcctggttcaaaccattcttgtgcttcagcctcccaagcaactgggattacagccccccaccatcatgcctggctaatttttgtatttttggtagacatggggtttcaaccatgttggccaggctggtctcgaactccttacctcaggtgatctgcctgccttggccatccaaagtgctgggactacaagggtgagccaccacacccggtctaaagtcagtattttttcttttcttttcttttttttttttttttttttg[235 bp omitted]gcctcccaaagtgctggtattacaggcgtgagccaccgcgcccggccataaagtcagtattttttcatccataaacatttagatgaagattatttcgtgccagacattctaagtacttta[132 bp omitted]tcctggattttacgccattctcctgcctcagcctccc[213 bp omitted]gatgcaggatctgaaccacagagaggttaggttgtgggctcaagaacacacagcaaacaagttcccacctcaaactgaaacccagaacatgtgctcttaatcacaacactgttaggctcccttttctcccgcaggaaaaaaatgattaattaactcatcct[133 bp omitted]tctgctcaaaatacaaaaattagccgggcatggtggtgctgcacacctgtagtctcagctattcgggaggctgaggcaggagaatcgcttgaacctgggaggcggaggttgcagtgagccgagatcgtgccattgcactccagcctgggcacagagtgagactctgtctcaaaaaaaagaaagtgacctagttgtgattcaaactcaggtttagtcctttgaatttgtgctgagtcatcattctgctaatggaattggaaaacttagaacatttgttccaggaaggaatgttaggaaagaaacaagtggtcctggcaacattttatagtacttagtttagaaatcaatttttcagtatccttcagttgcaaaatacagattgtgaaattattaatgttctgttttctttactagtacctaacaaaccacccccaaacttagtggcttaaagtagagatttggcaaacttttttttgtttgtttgtttttggtggagggagggagtgaggtggctccctgacccaaggtcttccatggtccaacctccctcaccgccatcccacctgcaaagggagggcacagaactgttttctgttctatgactccatagggcagacttttttttttttttttttttgagaagggctagagaatgaatattttcagctttgaaggccatgtttctactactctgccattacagcatgaaaacattatggacaatacatccatgaatgagtgtggccgtgtgccaacaaaactttgcttaccaaacaaggtagtgggcccgatttggtttgtatatggtagtttgctgactcctggcttaaaacacaattctgtggttctagggctttactgggctcagctgagtggttctaatttggagtctgtcatgatactgcagccagataatatctagggctgggattgtttgaagacttcttcactcacatggcttgcacctgggctctgaaggttggaacagcttcgggctggttggacatctgtatcttaaagatgcctctcatactcctattccaatttcttttattccccccattccgatttctaaaaataaaagaaaaaaattaaaagatgcctctctgtgtgactagcttgggcttccttacagcatggccgtctcccagtgaggatgctccaagagacttaaggtgatactttcaatgtttcttaggatctgactttaggagtcacaggcatcacttctgctttattctattggttaaaacctagtcataggtccagtcctgattcaaggggaaggaatgacacagggaataaatactggtagatcgctctttgggtaccatctttgggaacaagccaccagtttgatttttcagagaacttgctgacttccagatgctaatattcttgtggcccagtaaagatcacacaaacccaaataacatggccaggatggaaatacatacctttatgtgataactgttcatagcagaaggttttataccctccctttggtagacagtttactggagaaatctgaaaagaatgctattgataaaaattcactttgactgtaagaattgtggttatttgataggtttttggatgctcacgttgaaacagagtggagagttgatatgtaggttgagaaataaacatttagtctggacaatgtgtgtgcattatgggaagatgtgttaagccctggccaggcctgctagcttcagagagctagctcatgggtcaacttcagactctggaagaaggactttcaccccactttccatctgcacgctatgtcaagtcaggggtccctgatatctgtggtccaagctctacaaatgcgtgtgttcactgtacagcaggggaagtgtgcctttgagtttctgctaaataggcttaattccacctgccacaagctgacaaagacctgagatcagggcttcatgctatctagttatctccctgtgtacctttgccctttccatttacctataaacggcatgcctgggcaacgcaccaggatctacttccatcaggttggtggaaaagtaattgcggtttttgccattacatttatgacattgcaattacttttttttttttttttttttgagacggagtctcactctgttgaccgggctggagtgcagtggcatgatctcggctcactacaacctctgcctcccaggttcaagcaattctctgcctcagcctcccgagtagctgggattacaggcacctgccaccatgcccagctgatgtttgtatatttagtagagatggggttttcaccatgttgcccaggctggtcttgaactcctgacctcgtgattcacccgtctcggcttcccaaggtgttgggattacaggcgtgagccaccatgcccggcctttttatttttattgattttttttttttaggtggggtctcactttgtcatccaggctggagtgcagtggcacgatcttagctcactgcaacctccgcttcccaggttcaagcgattcttctgcctcagcctcctgagtagctgggattacaggcatgtgccaccatgcctggctaatttttgtatttttagtagagatgggatttcaccatgcaaccccagctcactgtaacctctgcctcccaggttcaagcaattctctgcctcagcctcccgagtacctgggattacaggcacccgctgccatgcccagctaatttttatatttttagtagagacagggtttcaccattttggccaggctggtctggaactcctgacctcaggtgatccacccatctcagcctcccaaagtggtgggattacagacgtgaggcactgcacccagccaagaaaccgcagttacttttgcaccaacctaataggagccattcctggacattggtcccgtttttattttatgatccaggggctccatctggatttgcaggaagagagaacagaagtttcacactgattccaggccaaagccttgagcgctagcacccgttggcagaggactcctgcatttgcaggatatttaggaacgccctggcaacaacagaagtggaacattcctcatttttcactgcccttctgacgctgtgcacgtaatttttttgtagaaggaaatagatcaaattgtaggagttaggaagcaaatgcctgaggttgaatgcgctctgtatttggtatctgctggatgataggaaatgggtttttttgttttgttttgtttttgtttttgttttttttttgagacagagttttgctcttgctgcccaggctggagtgcaatgacgcgatctcgactcactgcgacctccgcttcccgggttcaagcgattctcctgcctcagcctcctgcgtagctgggattacaggcatgcgcgaccatgcgtggctaatttggtatttttagtagagacggggtttctgcatgtcggtcgggctggtctcaaactcccgacctcaggtgatccacctgactcaggcctcccaaagtgctgggattacaggcatgagccacctcgcccagccaggaaatggttttattgtggacttctattttagtcccccacccccaggaagtataatccctctaactgcctggatggctcccatcctgtttataagactccagggagggaatcatcagtctcgtttcaatctatagattggtgcaaaagtaactgtggttttggccattactttcaatggcaaatctgcaattacttttgcaccaaccttaatagggttcctaattgttaggatgtattgcaagacactatagtggcatagcccagatggggcaaacagaatatgtatggtttgtttcctgactctgagcagtcagcagtcgatgcacagaactctgcacgcccctccccccacagtgtctattccggttcaagcatgcctactgaaacactaatttaagtcctttaatttctaccggttgaccctgatgatgtctgtgatgtttagacttttgtgtcagcttggctagcctgcagtacgcagttttttgtttttttttaacagaatcttgccctgtcgtccaggctggagtgcagtggcacaatctcagctcactgcaacctctgccacccgggttcaagcaattctcctgcctc[134 bp omitted]cagcctcccaggcatgagccactgtgcccggcccagtacccacttgtttaatcaaatgctagcctaggtgttgctgtgacagtatttcgtagacacagttaacatctacaatcagttgattttaaataaaggagatgaatggcgataacctgggtgggcccaagctaatcagttgaaggccttaagaacataaagaggtttcctgtagaagaaattctgcctgaagactgcagcatcaaatcctctctaagcttccaaacttccagcgtgccctacagattttggacttgccagcctctacaactgcatgagtcaatttcgtcaatttctttactcctccctgccgtgttttttttttttttgaaacagagtctcgctctgtcgcccaggctagagtgcagtggcacgatctcagctcactgcaacctccgccttctgggttcaagcgattcttgtgcctcagcctcccaagtagctgggattacaggcgtgcgccaccatgcccagctaatttttgtgtttttagtagagacggggtttccccatactggccaggctggtcttgaactcttgacctcatgcaatccacccacctctgcctcctaaagtgttgggattacaggcatgagccgccgtacccagcccaatttcttgaaatcaatcactttcctgttgattctgtttccctggagagtgctaactgtccccttatcctatgccacagatttactcttctgatcctttcatttatttgatactcggtgaattatacgaacactaactatgggctgggccccatcttgtccaataatttcccctctgcatataagcccagactcaatttaagatccctaaaacatgcaccagtgcccagatgtccttaatggagctaaggtttcaggctattgaagatgttaggaagggaggacagaaaccaaacacagtaagttctcaacacagaattcagaatttctctcttattctatatgattgttcttctgactacatatataccttttgtgacaaaatacgaacacctttggagattaagtgcttaaccagtgggattgcttcatatatcattatctgtagcctcactccctcaattatttctttcttttttttttttttttttttttgagacagggtgttgctctgtcacccaggctggagtgcagtggcaggatctcggctcactgcaacctctgcctcccgggttcaagcgattctcctgcctcaacctcccgagtagctgggactacgggcatacgccaccatgcccggctaatttttttttttttttgtaaaaagagagggggtttcaccatgttggccaggttggtcttgaactcctgacctcaaatgatctgcctgcctcggcctcccaaagtgctgaggttacaggcgtgagccaccgtgcccagccatctactcttaagtttggttgaagtttgtttatatattgttaggttacagtttgccacataaggaggcagctttaggccaaatttcacttaatttaaacaactggttttctcaatgctgcagtgaggtgagggcagaaaggcttgagcgcttgatgtgtcgggagggaaatatcttcactaacatagaacaacctgaaatttcaatggatcacatctgagaaatgaatctgaggttgagttgaaatcaaatatataaagtcaggtaggagtgaggacaaaatgccaatacttgatgtttcataaatgctttcatacataccagggaactattattatctctattttagagttaaaaaagggggtgttcagagtggttaatcattttacgaagtcatgtagctcctaagtggcagagctgggatttgatcccaggcactttcattccaagtctgtgtttgtaatctgtgacttatggtccccaaaagatacgttcacgtcccaacctctggaacctaccaatgtgaccttatttggaaaaagggtctttgcagatggcatcaagtgaagaatctcaagatgagagtatcattaattacctggtgggccttaaatccaataacaagtatccttatgagataaaaaagaggagaagacacaggcacacagagtagaaggccacatgaagttggaggcagagactggagtgttgcagccataagccaccgaaggtctgcagccaccaggcgctggaagagaccaggaaggatccttccccagagcctccagagggaatgtggcctgaccgataccttgattttggacttctggcctccagcactgtgagagaataacccacgatagtgtggtggtttgctctggcaggcacaggaagctaatacagtgctctttagttctacatggccccgcttcctccagagctacgtgggccttccctattagttgatgttcatcagttctattgcacaaagctgaagatgtccaacaacggtactcaaatcccacacatccttggggaccttgagggttctaggctctctaaggtaaggtgcctgttagggaggacagaatccagaaacagtgagttcgtttttttttcttttctttttctgttttttttgagagggagtttcactcttattgcctggctggagtgcaatggcaagatctcggctcactgcaacctccgccttccgggttcaagcaattctcctgcctcagcctcccgagtagctggaattacaggcatgtgtcaccactccaggctaattttgtatttttagtagagatggggtttc[137 bp omitted]tctcccattctgtactcttctcta[154 bp omitted]gaaaatacagaaattagctgggcgtggtggcaggctcctgtaatcccagctactccagaggctgaggcaggagaattgcttgaactcggagggcggaggttgaagtgagccgagattgtgccactgcaatccagcctgggtgacagagtgagactctgttacacacacaaaaaaaaacaaaaaacaaaacaacaaacaaacgtttgcatctgaaagaaatctgcatacttttgtatcattttcgttgatatttctctcaggttcatcaatcttgccagaagatctgcagaatctgcagatattcttactagagaagccgcagtgagtgtgaacatttcagccggggatgggaggaaggaaaagcagtcctggggacattttttgctccaggggaccagtgatgctccattaagtggcacttgcagatcaagttctgtttctgctttgaacagaatgttcaggcacccgagagatagaacaaagtgctgaactccgttcttcacgtcattaaccttaatgaccttcagacagttcccatccatacacagagtcctacagatttttgagatccaaaaggttattttactattgtcttaccaaatttctaggggacttgtctttagaattaggtagcggctatgtgaatcttccaggggtaaaggtcctctgcttcctcacagggattctcccacaatcccttcctgcatgccacaaacacagcatgtccctttcccctcaatccctgcaccttccaggcaacatttaatgcacctttttttttttttgagacagagtctcacccaggctggagtgcagtggtgcgatctcggctcactgcaacctccgcctcctgggtacaagtgattcttctgcctcagcctcttgagtagctgggactataggcacatgccaccacgcctggctaatttttctatttttagtagagacggggtttcaccacattggccaggctggtctacaactcctaaccccatgatctgcccaccttgccctcccaaagtgctgggattacaggcatgagacaccgcgcctggcctttttttttttttttttctttttttttaggacagagtctcacccaggttggagtgcagtgacacgatctctgttcactgcaacctccgcctcccgggttcaagcgattcccctgcctcagcctcctgaacagctgggattacaggcacccgtccccatgcccgggtaatttttgtatatttagtagagatggggtttcaccatg[135 bp omitted]gggctaagcctcaattttggggctcgcctgtgctgcatcagcttcacacctagagaagagagtgaaagagaagggagagccgtccttttgggctgccttgaaataaaggttgacccatgggttcatgtattgtcattcattctcattttctcttcctctctttctctctctcccctgccccttaagttagcttttctaaaccctacctggataaggataagaaatagaaggaggggacactttaggatgctacaaaataaaatacaacaacaacaacaataacagcagcagcaacaacaaaacagcaacaaaaggggaagaaacaaatctggccactgcacattcctccttggcaacaaaaagccgtggatgcaaaaagctgcccttcactgcatagacagaacagggcgcgctcgagctatgaatctcggaaattactcaaaccatcagcctctgcaagaagcaaagtggacggccgggcgcggtggctcactcctggaatcccagcactttgggagcccgaggtgggcggatcacgaggtcaggagatcgagactgttctggctaaaccagtgaaaccccctctctactaaaaaaataagaaaagcgaagtgcatctcccataaacgaggtactgcaggaagaaagcagaaaatgagacccgagtacacacatgcacgcgggcgcgcgcacacacacaccagaagaaatgaaccaagaggaaaggaaacattttcaaataagcatttggagatgggaaaaacacgttgaaacagaaattcataaagcacagaatttttttttaagttaaaaaaggaacaataatagacagaaaatgaatgaaaaattaaatgtcatatcagaagtgaagataaattaaaagtggtcaagggagaagagatctaaatgcaaacttaagaaggggcaattttttttttttttttttttttgagacgcagcctcactctgtcgcccgggctggagtgcagtggcgtgatcttggctcactgaaacctctgcctcctggattcaagcgattctcctgcctcagcctcccaagtggctgggattacaggcatgagccaccatgcccggcctagagtcatcatggaaattaaacaacctgcttccaaatgacttttgggtaaagactgaaattaaggcagaaataaaaaaattatctgaaactaatgaaaacaaacatacaacatcccagaatctctgggacacagctagaacagtgctcaaaggaagtttctagtgctaaagggctacactaagaagctagaaagatctcaaatgaaccgcctaacatcacacctagaggaattagaaaaacaagagcaaatcaaccccaaagctagcagaagaaaaaaaaaaaccaacatcggagctgacctgaatgaaatggagacgtaaaaaaccatacaaaagatcaatgaaacccaaagttgattttttaaaaaaattatttatttattatttattccataaattattggggtacaggtggtgtgtggttacataagctctttagtggtgatttgtgattttggtgcacccatcacctgagcagtatacactacaccctacttgttgtattttatccctcgcccccgccaactcgtccccctaagtccccaaagtccattgtatcattcttacgcctttgcgtcctcatagcttagctcccacatatcagtgagaacatacgatgtttggttttccattcctgagttacttcacttagaataacagtctccggtctcatccaggtcacggcaaatgctgttaattcatacaaagttgatatttttgaaagcataaataacatgggaagaccactagctagattaataaagaaaaaaagacaagatccaaataaacacaatcagaaatgacaaaggtgacattaccactgacccacagatatacaagaaaccctgagactattccacatgcctctatgcacacaaactagaaaactagaagaaatagagaaattcctggaaacataaaacctctcaagattgaaccaggaagaaatggaaaccctgaacaaaccaacgatgagttccaaaattgagttagtcatacaaaacctaccaaccagcacaaaaaaccttagactagacggattcacagtcgaatcctaccagatgtgtaaagaaaagccggcaccaatcctactgaaattattccacacaattgaggaggagcaactgctctctaactcattctatgaggtcagagtcattctgatactgaaacctggcagagacacaacgaaaaaaggaaaataggtaaagtaatacatatgttaatgatcttgatttagccattctacggtatatacatatttcaaaacaatatgtacatgataaatatgtacaatttgtcaattaaaaatatataaaaggaataggaaaaaattcaaatggcacagaatttgaaaggagaagatacagaacaaactccggtgtcttctttattcaactatatatacacacattcaatggactgggagcagtggctcaagcctgtaatcacagcactttgggaggtcaaggcgggcagatcacctgaggtcgggagttcgagaccagcctgaccaacagggagaaaccccagctctactaaaaatacaaaattagccgggcatggtggcgcatgcctgtaatcccagctactcggaaggctgaggcaggagaatcgcttgaactcaagaggtggaggttgtggtgagccgagatggcaccattgcactccagcctgggcaacaagagcgaaactcagtctcaaaaaaagaaaaaaaaggatttaatgaatgaatgatgagactgttggttacatctcccaccttctccctctcactccactgcagccacacggggctcctcactgttcccgtagcagcaggcatgtgcccccactgggcctctgtactggctgttcccactgcccgaacaccctcatgcaccatctgcactgtccaatatggccgcctctggccacacatggctactgagcagttgaacatggctggtccaaaccaacatttccaagacgtcgtatggtaaaaaataacataaaatcttgcaaaaatgtttctattgattatgttaaaattatgatgttttaggtatattaggttaaatcagctattttatccaaatgaatctcgcctgtttgtttttgcttttttttttttttttttttttgagatggaggctcgctctgtcgcccaggctagagtacaatggcgtggtctcggctcactgcatcactgcaacctctacctcccaggttcaagcgattctcctacctcaccctcccaagtggctgggattacaggcgtgtgccaccacacccagctaatttttgtatttttagtagagacagggtttcaccatgttggccaggctggtctcgaactgctgacctcgtgatctacctgcctcggcctcccaaagtcctgggattacaggtgtgggccactgcgccggccatgtttctcgacttctgctggcaagcatgttccagtatttgcatggctcctagccctcatctccatttctctgcacagatgttaccttccccatgaggtctgccttatacatgaggcctgtattataaactgcaactccgcattccccaaccccgttgtttcttctctccagaacactaggcaccatctgatctcctatgccttttccttattgtcagatactgaactctcagatacagttccccttcctccctccagggggcgccatggaacgcagggccctcactggccctggggactgggtgacgacaggggggagcctctggtgattggctccctcaccctgcgtaagatcaaagggactaaaggacagccccgacacccggagccattgtggctcaggcaggttgcgcctgccctcgggccctcacggaggcgggggttccagggcacgagttcgaggccagcctggtccacatgggtcggaaaaaaggacttttttttatcgttcccaatataacgacaaaacataaagggaggacgccttgataggaagaaatgacatcttcctaagtgtttttaaattacttccatgtgtcttttttttttttttttttgggagaccgagccttgctctgttgcccaggctggagtgcagtggtgtgatcttcgctcactgcaacctccgcctcgtcggttcaagggagtctcctatctaagcctcctgagtagctgggattacagtcgcctgccaagagatggggtttcgccatgttgaccaggctggtcttgaacacctggcctcaaatgatccactcgccttggtctcccaaagtggtaggatgacaggcgtgagccaccgcgcccagcctcttctattcttttagagacaggttctcactgtgttgcccaggctggagtgcattgatgtgatgtgtgatcatagctcattgcagccctgaccatccgagctcaagcaatccttctgcctcagcctcctgagtagctggggccgcagatgtgcaccactgcacctggctaatttttaacatttttgtggagccagagtctgtataaaataaagtgtaaatagtaccataaataaagaatacatagtaccattttatagtagtataaaacggacattagaaactctgaacttaaaggttaaaaaaatacacaaaagtagttctcaagttctagagacttggagaatccaggaatcaacaatgtcgtggaactcctacagcctttcataaagaatggccctcgaggaaagtggaattgtcagtgggcattgtgttcgtgcctcagctaaacacggcaggaatttatttataacctagtgtaacatcctcgaggcactgttcaattagtcaagcaattgtaaaattctcccagtcttagaaaagatacaggtgtgtgtccctctgctgtggctgtgcactgacgcttcagtaaaagttgccgtctaaaaccaccggcctgcccttgaattgttttgttttgttttgttttgttttgtttttttgattcgcagcctcactctatcacccaggctggagtgcagtgacacgatctctgttcactgcaacctccgcctcccgggttcaagcgattcccctgcctcagcctcctgaacagctgggattacaggcacccgtccccatgcccgggtaatttttgtatatttagtagagatggggtttcaccatt[135 bp omitted]gggctaagcctcaattttggggctcgcctgtgctgcatcagcttcacacctagagaagagagtgaaagagaagggagagccgtccttttgggctgccttgaaataaaggttgacccatgggttcatgtattgtcattcattctcattttctcttcctctctttctctctctcccctgccccttaagttagcttttctacaccctacctggataaggataagaaatagaaggaggggacactttaggatgctacaaaataaaatacaacaacaacaacaataacagcagcagcaacaacaacaacagcaacaaaaggggaagaaacaaatctggccactgcacattcctccttggcaacaaaaagccgtggatgcaaaaagctgcccttcactgcatagacagaagagggcgcgctcgagctatgaatctcggaaattactcaagccatcagcctctgcaagaagcaaagtggacggccgggcgcggcggctcactcctggaatcccagcactttgggagcccgaggtgggcggatcacgaggtcaggagatcgagactgttctggctaaaccagtgaaaccccctctctactaaaaaaataacaaaagcgaagtgcatctcccataaacgaggtactgcaggaagaaagcagaaaatgagacccgagtacacacatgcacgcgggcgtgcgcacacacacaccagaagaaatgaaccaagaggaaaggaaatattttcaagtaagcatttggagatgggaaaaacaccttgaaacagaaattcataaagtacacacatgtttttttttttaagttaaaagaggaacaataataaacaggcagaaaatgaataaaaaataaaatgtcatatcagaagtgaagataaattaaaagtggtcaaaggagaagagatctaaatgcaaacttaagaaggggcaattttttttttttttttttttgagacgcagcctcactctgtcgcccgggctggagtgcagtggcgtgatcttggctcactgaaacctctgcctcctggattcaagcgattctcctgcctcagcctcccaagtggctgggattacaggcatgagccaccatgcccggcctagagtcatcatggaaattaaacaacctgcttccaaatgacttttgggtaaagactgaaattaaggcagaaataaaaaaattatttgaaactaatgaaaacaaacatacaacatcccagaatctctgggacacagctacaacagtgctcagaggaagtttctagtgctatatggctacattaagaagctagaaagatctcaaatgaaccgcctaacatcacacctagaggaattagaaaaacaagagcaaatcaaccccaaagctagcagaagaaaaaaaaaaaacaaaatcagagctgagctgaatgaaattgagatgtaaaataccatacaaaagatcaatgaaacccaaagttgattttttaaaaaaattatttatttattatttattccataaattattggggtacaggtggtatgtggttacataagctctttagtggtgatttgtgattttggtgcacccatcacctgagcagtatacactaccccctatttgttgtcttttatccctcgccctcgccaactcgtccccctaagtccccaaagtccattgtatcattcttatgcctttgtgtcctcatagcttaggtcccacatatcagtgagaacatacgatgtttggttttccattcctgagttacttcacttagaataatactctccggtctcatccaggtcactgcaaatgctgttaattcatacaaagttgatatttttggaagcataaataacatggaaagaccactagctagattaataaagaaaaaaagacaagatccaaataaacacaatcagaaatgacagaggtgacattaccactgacccacagacatacaagaaaccctgagactattccaaatgcctctatgcacaaaaactagaaaactagaagaaatagagaaattcctggaaacataaaacctctcaagattgaaccaggaagaaatggaaaccctgaacaaaccaacgatgagttccaaaattgagttagtcatacaagacctaccaaccagcgcaaaaaaccttagactagacggattcacagtcgaattctaccagatgtgtaaagaaaagccggcaccaatcctactgaaattattccacacaattgaggaggagcaactgctctctaactcattctatgaggtcagagtcattctgataccgaaacctggcagagacacaacgaaaaaaggaaaataggtaaagtaatacatatgttaatgatcttgatttagccattctacggtatatacatatttcaaaacaatatgtacatgataaatatgtacaatttgtcaattaaaaatatataaaaggaagaggaaaaaattcaaatggcgtagaatttgaaaggagaagatacagaacaaactccagtgtcttattattcaactatatatacacacgttcaatggaccgggagcagtggctcaagcctgtaatcacagcactttgggaggtcaaggcgggcagatcacctgaggtcgggagttcgagaccagcctgaccaacagagagaaaccccagctctactaaaaatacaaaattagccgggcatggtgacgcatgcctgtaatcccagctactcgggagggtgaggcaggagaatcgcttgaactcaagaggtggaggttgtggtgagccgagatggcaccattgcactccagcctgggcaacaagagcgaaactcagtctcaaaaaaaaaaaaaaaaaaaagaaaaaggatttaatgaatgaatgatgagaccgttggtgacatctcccaccttctccctctcactccactgcagccacacggggctcctcactgttcccgtagcagcaggcatgtgcccccacagggcctctgtactggctgttcccactgcccgaacaccctcatgcaccatctgcactgtccaatacggccgcctctggccacacatggctactgagcagttgaacatggctggtccaaaccaagatttccaagacgtcgtgtggtaaaaaaaacaacataaaattttgcaaaaatgtttctattgattatgttaaaattatgatgttttaggtatattaggttaaatcagctattttatcaaaatgaatctcgcctgtttgtttttgcttttttttttttttttttgagatggagtctcgctctgtcgcccaggctagagtacaatggcgtggtctcagctcactgcatcactgcaacctctacctcccaggttcaagcgattctcctacctcaccctcccaagtggctgggattacaggcgtgtgccaccacacccagctaatttttgtatttttgtagagacagggtttcaccatgttggccaggctggtctcgaactgctgacctcgtgatctacctgcctcggcctcccaaagtcctgggattacaggtgtgggccactgcgccggccatgtttctcgacttctgctggcaagcatgttccagtatttgcatggctcctagccctcatctccatttctctgcacagatgttatcttccccatgaggtctgccttatacatgaggcctgtattataaagtgcaactgccaattcgccaaccccgttgtttcttctctccagaacactaggcaccatctgatctcctatgccttttccttattgtcagatactgaactctcagatacagttccccttcctccctccagggggcgccatggaacgcagggccctcactggccctggggactgggtgacgtcaggggtgagcctctggtgattggctccctcaccctgcgtaagatcaaagggcctaaaggtcagccccgacacccggagctattgtggctccggccggttgcgcgggccctcggaccctcagagaggcgagggttcgagggctcgagttcgaggccaacctggtccacatgggttgaaaaaaaaattttttttatcgttcccaatataacgacaaaacataaagggaggacgccttgataggaagaaatgacatcttcctaagtgtttttaaattacttcaatgtatctttctttttttttttttttttgggagaccgaggcttgctctgttgcccaggctggagtgcagtggtgtgatcttggctcactgcaacctctgcctcgtcggttcaagggagtctcctatctcagcctcctgagtagctgggattacagtcgcctgccaagagatggggtttcgccatgttgaccaggctggtcttgaacacctggcctcaaatgatccactcgccttggtctcccaaagtggtaggatgacaggcgtgagccaccgcgcccagcctcttctattcttttagagacagcgtctcactctgttgcccaggctggagtgcattgatgtgatgtgtgatcatagctcattgcagccctgaccatccgagctcaagcaatccttctgcctcagcctcctgagtagctggggccgcagatgtgcaccactgcacctggctaatttttaacattttttgtggagccagagtctgtataaaataaagtgtaaatagtaccataaataaagaatacatagtaccattttatagtagtataaaacggacattagaaactctggacttaaagtttaaaaaaatacacaaaagtagttctcaagttctagagacttggagaatccaggaatcaacaatgtcgtggaactcctacagcctttcataaagaatggccctcgaggaaagtggaattgtcagtgggcattgtgttcgtgcctcagctaaacacggcaggaatttatttataacctagtgtaacatcctcgaggcactgttcaattagtcaagcaattgtaaaattctcccagtcttagaaaagatacaggtgtgtgtccctctgctgtggctgtgcactgacgcttcagtaaaagttgccgtctaaaaccaccggcctgcccttgaattgttttgttttgttttgttttgttttgttttgttttgttttgtttttttgattcgcagcctcactctatcacccaggctggagtgcagtgacacgatctctgttcactgcaacctccgcctcccgggttcaagcgattcccctgcctcagcctcctgaacagctgggattacaggcacccgtccccatgcccgggtaatttttgtatatttagtagagatggggtttcaccatg[135 bp omitted]gggctaagcctcaattttggggctcgcctgtgctgcatcagcttcacacctagagaagagagtgaaagagaagggagagccgtccttttgggctgccttgaaataaaggttgacccatgggttcatgtattgtcattcattctcattttctcttcctctctttctctctctcccctgccccttaagttagcttttctacaccctacctggataaggataagaaatagaaggaggggacactttaggatgctacaaaataaaatacaacaacaacaacaataacagcagcagcaacaacaacaacagcaacaaaaggggaagaaacaaatctggccactgcacattcctccttgccaacaaaaagccgcggatgcaaaaagctgcccttcactgcatagacagaagagggcgcgctcgagctatgaatctcgaaaattactcaaaccatcagcctctgcaagaagcaaagtggacggccgggcgcggcggctcactcctggaatcccagcactttgggagcccgaggtgggcggatcacgaggtcaggagatcgagactgttctggctaaaccagtgaaaccccctctctactaaaaaaataagaaaagcgaagtgcatctcccataaacgaggtactgcaggaagaaagcagaaaatgagacccgagtacacacatgcacgcgggcgcgcgcacacacacaccagaagaaatgaaccaagaggaaaggaaacattttcaaataagcatttggagatgggaaaaacaccttgaaacagaaattcataaagcacagaatttttttttaagttaaaaaaggaacaataatagacagaaaatgaatgaaaaattaaatgtcatatcagaagtgaagataaattaaaagtggtcaaaggagaagagatctaaatgcaaacttaagaaggggcaatttttttttttttttttttttgagacgcagcctcactctgtcgcccaggctggagtgcagtggcgtgatcttggctcactgaaacctctgcctcctggattcaagcgattctcctgcctcagcctcccaagtggctgggattacaggcatgagccaccatgcccggcctagagtcatcatggaaattaaacaacctgcttccaaatgacttttgggtaaagactgaatttaaggcagaaataaaaaaattatttgaaactaatgaaaacaaacatacaacatcccagaatctctgggacacagctagaacagtgctcaaaggaagtttctagtgctatatggctacactaagaagctagaaagatctcaaatgaaccgcctaacatcacacctagaggaattagaaaaacaagagcaaatcaaccccaaagctagcagaagaaaaaaagaaaaccaacatcggagctgacctgaatgaaatggagacgtaaaaaaccatacaaaagatcaatgaaacccaaagttgattttttaaaaaaattatttatttattatttattccataaattattggggtacaggtggtgtgtggttacataagctctttagtggtgatttgtgattttggtgcacccatcacctgagcagtatacactacaccctacttgttgtattttatccctcgcccccgccaactcgtccccctaagtccccaaagtccattgtatcattcttacgcctttgcgtcctcatagcttagctcccacatatcagtgagaacatacgatgtttggttttccattcctgagttacttcagttagaataacagtctccggtctcatccaggtcacggcaaatgctgttaattcatacaaggttgatatttttgaaagcataaataacatgggaagaccactagctagattaataaagaaaaaaagacaagatccaaataaacacaatcagaaatgacaaaggtgacattaccactgacccacagatatacaagaaaccctgagactattccacatgcctctatgcacacaaactagaaaactagaagaaatagagaaattcctggaaacataaaacctctcaagattgaaccaggaagaaatggaaaccctgaacaaaccaacgatgagttccaaaattgagttagtcatacaaaacctaccaaccagcacaaaaaaccttagactagacggattcacagtcgaatcctaccagatgtgtaaagaaaagccggcaccaatcctactgaaattattccacacaattgaggaggagcaactgctctctaactcattctatgaggtcagagtcattctgataccgaaacctggcagagacacaacgaaaaaaggaaaataggtaaagtaatacatatgttaatgatcttgatttagccattctacggtatatacatatttcaaaacaatatgtacatgataaatatgtacaatttgtcaattaaaaatatataaaaggaataggaaaaaattcaaatggcacagaatttgaaaggagaagatacagaacaaactccggtgtcttctttattcaactatatatacacacattcaatggactgggagcagtggctcaagcctgtaatcacagcactttgggaggtcaaggcgggcagatcacctgaggtcgggagttcgagaccagcctgaccaacagggagaaaccccagctctactaaaaatacaaaattagccgggcatggtggcgcatgcctgtaatcccagctactcggaggctgaggcaggagaatcgcttgaactcaagaggtggaggttgtggtgagccgagatggcaccattgcactccagcctgggcaacaagagcgaaactcagtctcaaaaaaagaaaaaaaaggatttaatgaatgaatgatgagactgttggttacatctcccaccttctccctctcactccactgcagccacacggggctcctcactgttcccgtagcagcaggcatgtgcccccactgggcctctgtactggctgttcccactgcccgaacaccctcatgcaccatctgcactgtccaatacggccgcctctggccacacatggctactgagcagttgaacatggctggtccaaaccaagatttccaagacgtcgtatggtaaaaaataacataaaatcttgcaaaaatgtttctattgattatgttaaaattatgatgttttaggtatattaggttaaatcagctattttatccaaatgaatctcgcctgtttgtttttgcttttttttttttttttttttttttgagatggaggctcgctctgtcgcccaggctagagtacaatggcgtggtctcggctcactgcatcactgcaacctctacctcccaggttcaagcgattctcctacctcaccctcccaagtggctgggattacaggcgtgtgccaccacacccagctaatttttgtatttttagtagagacagggtttcaccatgttggccaggctggtctcgaactgctgacctcgtgatctacctgcctcggcctcccaaagtcctgggattacaggtgtgggccactgcgccagccatgtttctcgacttctgctggcaagcatgttccagtatttgcatggctcctagccctcatctccatttctctgcacagatgttaccttccccatgaggtctgccttatacatgaggcctgtattataaactgcaactccgcattccccaaccccgttgtttcttctctccagaacactaggcaccatctgatctcctatgccttttccttattgtcagatactgaactctcagatacagttccccttcctccctccagggggcgccatggaacgcagggccctcactggccctggggactgggtgacgacaggggggagcctctggtgattggctccctcaccctgcgtaagatcaaagggactaaaggacagccccgacacccggagccattgtggctcaggccggttgcgcctgccctcgggccctcacggaggcgggggttccagggcacgagttcgaggccagcctggtccacatgggtcggaaaaaaggacttttttttatcgttcccaatataacgacaaaacataaagggaggacgccttgataggaagaaatgacatcttcctaagtgtttttaaattacttccatgtgtcttttttttttttttttttgggagaccgagccttgctctgttgcccaggctggagtgcagtggtgtgatcttcgctcactgcaaactccgcctcgtcggttcaagggagtctcctatctaagcctcctgagtagctgggattacagtcgcctgccaagagatggggtttcgccatgttgaccaggctggtcttgaacacctggcctcaaatgatccactcgccttggtctcccaaagtggtaggatgacaggcgtgagccaccgcgcccagcctcttctattcttttagagacagggtctcactgtgttgcccaggctggagtgcattgatgtgatgtgtgatcatagctcattgcagccctgaccatccgagctcaagcaatccttctgcctcagcctcctgagtagctggggccgcagatgtgcaccactgcacctggctaatttttaacatttttgtggagccagagtctgtataaaataaagtgtaaatagtaccataaataaagaatacatagtaccattttatagtagtataaaacggacattagaaactctgaacttaaaggttaaaaaaatacacaaaagtagttctcaagttctagagacttggagaatccaggaatcaacaatgtcgtggaactcctacagcctttcataaagaatggccctcgaggaaagtggaattgtcagtgggcattgtgttcgtgcctcagctaaacacggcaggaatttatttataacctagtgtaacatcctcgaggcactgttcaattagtcaagcaattgtaaaattctcccagtcttagaaaagatacaggtgtgtgtccctctgctgtggctgtgcactgaggcttcggtaaaggttgccgtctaaaaccaccggcgtgcccttgaattcttttttttttttttttctttttcagacggagtcgcactctatcacccaggctggagtgcagtgacacgatctctgttcactgcaacctccgcctcccgggttcaagcgattcccctgcctcagcctcctgaacagctgggattacaggcacccgtccccatgcccgggtaatttttgtatatttagtagagatggggttttcagcatg[136 bp omitted]ggctaagcctcaattttggggctcgcctgtgctgcatcagcttcacacctagagaagagagtgaaagagaagggagagccgtccttttgggctgccttgaaataaaggttgacccatgggttcatgtattgtcattcattctcattttctcttcctctctttctctctctcccctgccccttaagttagcttttctaaaccctacctggataaggataagaaatagaaggaggggacactttaggatgctacaaaataaaatacaacaacaacaacaataacagcagcagcaacaacaacaacagcaacaaaaggggaagaaacaaatctggccactgcacattcctccttgccaacaaaaagccgcggatgcaaaaagctgcccttcactgcatagacagaagagggcgcgctcgagctatgaatctcggaaattactcaaaccatcagcctctgcaagaagcaaagtggacggccgggcgcggtggctcactcctggaatcccagcactttgggagcccgaggtgggcggatcacgaggtcaggagatcgagactgttctggctaaaccagtgaaaccccctctctactaaaaaaataacaaaagcgaagtgcatctcccataaacgaggtactgcaggaagaaagcagaaaatgagacccgagtacacacatgcacgcgggcgcgcgcacacacacaccagaagaaatgaaccaagaggaaaggaaacattttcaaataagcatttggagatgggaaaaacaccttgaaacagaaattcataaagcacagaatttttttttaagttaaaaaaggaacaataatagacagaaaatgaacgaaaaattaaatgtcatatcagaagtgaagataaattaaaagtggtcaaaggagaagagatctaaatgcaaacttaagaaggggcaattttttttttttttttttttgagacgcagcctcactctgtcgcccgggctggagtgcagtggcgtgatcttggctcactgaaacctctgcctcctggattcaagcgattctcctgcctcagcctcccaagtggctgggattacaggcatgagccaccatgcccggcctagagtcatcatggaaattaaacaacctgcttccaaatgacttttgggtaaagactgaatttaaggcagaaataaaaaaattatttgaaactaatgaaaacaaacatacaacatcccagaatctctgggacacagctagaacagtgctcaaaggaagtttctagtgctatatggctacactaagaagctagaaagatctcaaatgaaccgcctaacatcacacctagaggaattagaaaaacaagagcaaatcaaccccaaagctagcagaagaaaaaaaaaaaccaacatcggagctgacctgaatgaaatggagacgtaaaaaaccatacaaaagatcaatgaaacccaaagttgattttttaaaaaaattatttatttattatttattccataaattattggggtacaggtggtgtgtggttacataagctctttagtgatgatttgtgattttggtgcacccatcacctgggcagtatacactacaccctacttgttgtattttatccctcgcccccgccaactcgtccccctaagtccccaaagtccattgtatcattcttacgcctttgcgtcctcatagcttagctcccacatatcagtgagaacatacgatgtttggttttccattcctgagttacttcacttagaataacagtctccggtctcatccaggtcacggcaaatgctgttaattcatacaaagttgatatttttgaaagcataaataacatgggaagaccactagctagattaataaagaaaaaaagacaagatccaaataaacacaatcagaaatgacaaaggtgacattaccactgacccacagatatacaagaaaccctgagactattccacatgcctctatgcacacaaactagaaaactagaagaaatagagaaattcctggaaacataaaacctctcaagattgaaccaggaagaaatggaaaccctgaacaaaccaacgatgagttccaaaattgagttagtcatacaaaacctaccaaccagcacaaaaaaccttagactagacggattcacagtcgaatcctaccagatgtgtaaagaaaagccggcaccaatcctactgaaattattccacacaattgaggaggagcaactgctctctaactcattctatgaggtcagagtcattctgataccgaaacctggcagagacacaacgaaaaaaggaaaataggtaaagtaatacatatgttaatgatcttgatttagccattctacggtatatacatatttcaaaacaatatgtacatgataaatatgtacaatttgtcaattaaaaatatataaaaggaataggaaaaaattcaaatggcacagaatttgaaaggagaagatacagaacaaactccggtgtcttctttattcaactatatatacacacattcaatggactgggagcagtggctcaagcctgtaatcacagcactttgggaggtcaaggcgggcagatcacctgaggtcgggagttcgagaccagcctgaccaacagggagaaaccccagctctactaaaaatacaaaattagccgggcatggtggcgcatgcctgtaatcccagctactcggaaggctgaggcaggagaatcgcttgaactcaagaggtggaggttgtggtgagccgagatggcaccattgcactccagcctgggcaacaagagcgaaactcagtctcaaaaaaagaaaaaaaaggatttaatgaatgaatgatgagactgttggttacatctcccaccttctccctctcactccactgcagccacacggggctcctcactgttcccgtagcagcaggcatgtgcccccactgggcctctgtactggctgttcccactgcccgaacaccctcatgcaccatctgcactgtccaatacggccgcctctggccacacatggctactgagcagttgaacatggctggtccaaaccaacatttccaagacgtcgtatggtaaaaaataacataaaatcttgcaaaaatgtttctattgattatgttaaaattatgatgttttaggtatattaggttaaatcagctattttatccaaatgaatctcgcctgtttgtttttgctttttttttttttttttttttttgagatggaggctcgctctgtcgcccaggctagagtacaatggcgtggtctcggctcactgcatcactgcaacctctatctcccaggttcaagcgattctcctacctcaccctcccaagtggctgggattacaggcgtgtgccaccacacccagctaatttttgtatttttagtagagacagggtttcaccatgttggccaggctggtctcgaactgctgacctcgtgatctacctgcctcggcctcccaaagtcctgggattacaggtgtgggccactgcgccggccatgtttctcgacttctgctggcaagcatgttccagtatttgcatggctcctagccctcatctccatttctctgcacagatgttaccttccccatgaggtctgccttatacatgaggcctgtattataaagtgcaactccgcattccccaaccccgttgtttcttctctccagaacactaggcaccatctgatctcctatgccttttccttattgtcagatactgaactctcagatacagttccccttcctccctccagggggcgccatggaacgcagggccctcactggccctggggactgggtgacgacaggggggagcctctggtgattggctccctcaccctgcgtaagatcaaagggactaaaggacagccccgacacccggagccattgtggctcaggccggttgcgcctgccctcgggccctcacggaggcgggggttccagggcacgagttcgaggccagcctggtccacatgggtcggaaaaaaggattttttttatcgttcccaatataacgacaaaacgtaaagggaggacgccttgataggaagaaatgacatcttcctaagtgtttttaaattacttccatgtgtctttttttttttttttttttgggagaccgagccttgctctgttgcccaggctggagtgcagtggtgtgatcttcgctcactgcaacctccgcctcgtcggttcaagggagtctcctatctaagcctcctgagtagctgggattacagtcgcctgccaagagatggggtttcgccatgttgaccaggctggtcttgaacacctggcctcaaatgatccactcgccttggtctcccaaagtggtaggatgacaggcgtgagccaccgcgcccagcctcttctattcttttagagacagcgtctcactctgttgcccaggctggagtgcattgatgtgatgtgtgatcatagctcattgcagccctgaccatccgagctcaagcaatccttctgcctcagcctcctgagtagctggggccgcagatgtgcaccactgcacctggctaatttttaacatttttgtggagccagagtctgtataaaataaagtgtaaatagtaccataaataaagaatacatagtaccattttatagtagtataaaacggacattagaaactcagaacttaaaggttaaaaaaatacacaaaagtagttctcaagttctagagacttggagaatccaggaatcaacaatgtcgtggaactcctacagcctttcataaagaatggccctcgaggaaagtggaattgtcagtgggcattgtgttcgtgcctcagctaaacacggcaggaatttatttataacctagtgtaacatcctcgaggcactgttcaattagtcaagcaattgtaaaattctcccagtcttagaaaagatacaggtgtgtgtccctctgctgtggctgtgcactgaggcttcggtaaaggttgccgtctaaaaccaccggcgtgcccttgaattctttttttttttttttttctttttcagacggagtcgcactctatcacccaggctggagtgcagtgacacgatctctgttcactgcaacctccgcctcccgggttcaagcgattcccctgcctcagcctcctgaacagctgggattacaggcacccgtccccatgcccgggtaatttttgtatatttagtagagatggggtttcaccatg[135 bp omitted]gagctaagcctcaattttggggctcgcctgtgctgcatcagcttcacacctagagaagagagtgaaagagaagggagagccgtccttttgggctgccttgaaataaaggttgacccatgggttcatgtattgtcattcattctcattttctcttcctctctttctctctctcccctgccccttaagttagcttttctacaccctacctggataaggataagaaatagaaggaggggacactttaggatgctacaaaataaaatacaacaacaacaacaataacagcagcagcaacaacaacaacagcaacaaaaggggaagaaacaaatctggccactgcacattcctccttggcaacaaaaagccgtggatgcaaaaagctgcccttcactgcatagacagaacagggcgcgctcgagctatgaatctcggaaattactcaagccatcagcctctgcaagaagcaaagtggacggccgggcgcggcggctcactcctggaatcccagcactttgggagcccgaggtgggcggatcacgaggtcaggagatcgagactgttctggctaaaccagtgaaaccccctctctactaaaaaaataacaaaagcgaagtgcatctcccataaacgaggtactgcaggaagaaagcagaaaatgagacccgagtacacacatgcacgcgggcgtgcgcacacacacaccagaagaaatgaaccaagaggaaaggaaatattttcaagtaagcatttggagatgggaaaaacaccttgaaacagaaattcataaagtacacacatgtttttttttttaagttaaaagaggaacaataataaacaggcagaaaatgaataaaaaataaaatgtcatatcagaagtgaagataaattaaaagtggtcaaaggagaagagatctaaatgcaaacttaagaaggggcaattttttttttttttttttgagacgcagcctcactctgtcgcccgggctggagtgcagtggcgtgatcttggctcactgaaacctctgcctcctggattcaagcgattctcctgcctcagcctcccaagtggctgggattacaggcatgagccaccatgcccggcctagagtcatcatggaaattaaacaatgaaacccaaagttgattttttaaaaaaattatttattatttattccataaattattggggtacaggtggtatgtggttacataagctctttagtggtgatttgtgattttggtgcacccatcacctgagcagtatacactaccccctatttgttgtcttttatccctcgccctcgccaactcgtccccctaagtccccaaagtccattgtatcattcttatgcctttgtgtcctcatagcttaggtcccacatatcagtgagaacatacgatgtttggttttccattcctgagttacttcacttagaataatactctccggtctcatccaggtcactgcaaatgctgttaattcatacaaagttgatatttttggaagcataaataacatggaaagaccactagctagattaataaagaaaaaaagacaagatccaaataaacacaatcagaaatgacagaggtgacattaccactgacccacagacatacaagaaaccctgagactattccacatgcctctatgcacaaaaactagaaaactagaagaaatagataaattcctggaaacataaaacctctcaagattgaaccaggaagaaatggaaaccctgaacaaaccaacgatgagttccaaaattgagttagtcatacaagacctaccaaccagcgcaaaaaaccttagactagacggattcacagtcgaattctaccagatgtgtaaagaaaagccggcaccaatcctactgaaattattccacacaattgaggaggagcaactgctctctaactcattctatgaggtcagagtcattctgataccgaaacctggcagagacacaacgaaaaaaggaaaataggtaaagtaatacatatgttaatgatcttgatttagccattctacggtatatacatatttcaaaacaatatgtacatgataaatatgtacaatttgtcaattaaaaatatataaaaggaagaggaaaaaattcaaatggcgtagaatttgaaaggagaagatacagaacaaactccagtgtcttattattcaactatatatacacacgttcaatggaccgggagcagtggctcaagcctgtaatcacagcactttgggaggtcaaggcgggcagatcacctgaggtcgggagttcgagaccagcctgaccaacagagagaaaccccagctctactaaaaatacaaaattagccgggcatggtgacgcatgcctgtaatcccagctactcgggagggtgaggcaggagaatcgcttgaactcaagaggtggaggttgtggtgagccgagatggcaccattgcactccagcctgggcaacaagagcgaaactcagtctcaaaaaaaaaaaaaaaaaaagaaaaaggatttaatgaatgaatgatgagaccgttggtgacatctcccaccttctccctctcactccactgcagccacacggggctcctcactgttcccgtagaagcaggcatgtgcccccacagggcctctgtactggctgttcccactgcccgaacaccctcatgcaccatctgcactgtccaatacggccgcctctggccacacatggctactgagcagttgaacatggctggtccaaaccaagatttccaagacgtcgtgtggtaaaaaaaacaacataaaattttgcaaaaatgtttctattgattatgttaaaattatgatgttttaggtatattaggttaaatcagctattttatcaaaatgaatctcgcctgtttgtttttgctttttttttttttttttgagatggagtctcgctctgtcgcccaggctagagtacaatggcgtggtctcagctcactgcatcactgcaacctctacctcccaggttcaagcgattctcctacctcaccctcccaagtggctgggattacaggcgtgtgccaccacacccagctaatttttgtatttttgtagagacagggtttcaccatgttggccaggctggtctcgaactgctgacctcgtgatctacctgcctcggcctcccaaagtcctgggattacaggtgtgggccactgcgccggccatgtttctcgacttctgctggcaagcatgttccagtatttgcatggctcctagccctcatctccatttctctgcacagatgttatcttccccatgaggtctgccttatacatgaggcctgtattataaagtgcaactgccaattcgccaaccccgttgtttcttctctccagaacactaggcaccatctgatctcctatgccttttccttattgtcagatactgaactctcagatacagttccccttcctccctccagggggcgccatggaacgcagggccctcactggccctggggactgggtgacgtcaggggtgagcctctggtgattggctccctcaccgtgcgtaagatcaaagggcctaaaggtcagccccgacacccggagctattgtggctccggccggttgcgcgggccctcggaccctcagagaggcgagggttcgagggctcgagttcgaggccaacctggtccacatgggttgaaaaaaaaattttttttatcgttcccaatataacgacaaaacataaagggaggacgccttgataggaagaaatgacatcttcctaagtgtttttaaattacttcaatgtatctttctttttttttttttttttgggagaccgaggcttgctctgttgcccaggctggagtgcagtggtgtgatcttggctcactgcaacctctgcctcgtcggttcaagggagtctcctatctcagcctcctgagtagctgggattacagtcgcctgccaagagatggggtttcgccatgttgaccaggctggtcttgaacacctggcctcaaatgatccactcgccttggtctcccaaagtggtaggatgacaggcgtgagccaccgcgcccagcctcttctattcttttagagacagcgtctcactctgttgcccaggctggagtgcattgatgtgatgtgtgatcatagctcattgcagccctgaccatccgagctcaagcaatccttctgcctcagcctcctgagtagctggggccgcagatgtgcaccactgcacctggctaatttttaacattttttgtggagccagagtctgtataaaataaagtgtaaatagtaccataaataaagaatacatagtaccattttatagtagtataaaacggacattagaaactctggacttaaagtttaaaaaaatacacaaaagtagttctcaagttctagagacttggagaatccaggaatcaacaatgtcgtggaactcctacagcctttcataaagaatggccctcgaggaaagtggaattgtcagtgggcattgtgttcgtgcctcagctaaacacggcaggaatttatttataacctagtgtaacatcctcgaggcactgttcaattagtcaagcaattgtaaaattctcccagtcttagaaaagatacaggtgtgtgtccctctgctgtggctgtgcactgacgcttcagtaaaagttgccgtctaaaaccaccggcctgcccttgaattgttttgttttgttttgttttgttttgtttttttgattcgcagcctcactctatcacccaggctggagtgcagtgacacgatctctgttcactgcaacctccgcctcccgggttcaagcgattcccctgcctcagcctcctgaacagctgggattacaggcacccgtccccatgcccgggtaatttttgtatatttagtagagatggggtttcaccatg[135 bp omitted]gggctaagcctcaattttggggctcgcctgtgctgcatcagcttcacacctagagaagagagtgaaagagaagggagagccgtccttttgggctgccttgaaataaaggttgacccatgggttcatgtattgtcattcattctcattttctcttcctctctttctctctctcccctgccccttaagttagcttttctacaccctacctggataaggataagaaatagaaggaggggacactttaggatgctacacaataaaatacaacaacaacaacaataacagcagcagcaacaacaacaacagcaacaaaaggggaagaaacaaatctggccactgcacattcctccttgccaacaaaaagccgcggatgcaaaaagctgcccttcactgcatagacagaagagggcgcgctcgagctatgaatctcgaaaattactcaaaccatcagcctctgcaagaagcaaagtggacggccgggcgcggcggctcactcctggaatcccagcactttgggagcccgaggtgggcggatcacgaggtcaggagatcgagactgttctggctaaaccagtgaaaccccctctctactaaaaaaataagaaaagcgaagtgcatctcccataaacgaggtactgcaggaagaaagcagaaaatgagacccgagtacacacatgcacgcgggcgcgcgcacacacacaccagaagaaatgaaccaagaggaaaggaaacattttcaaataagcatttggagatgggaaaaacaccttgaaacagaaattcataaagcacagaatttttttttaagttaaaaaaggaacaataatagacagaaaatgaatgaaaaattaaatgtcatatcagaagtgaagataaattaaaagtggtcaaaggagaagagatctaaatgcaaacttaagaaggggcaatttttttttttttttttttttgagacgcagcctcactctgtcgcccaggctggagtgcagtggcgtgatcttggctcactgaaacctctgcctcctggattcaagcgattctcctgcctcagcctcccaagtggctgggattacaggcatgagccaccatgcccggcctagagtcatcatggaaattaaacaacctgcttccaaatgacttttgggtaaagactgaatttaaggcagaaataaaaaaattatttgaaactaatgaaaacaaacatacaacatcccagaatctctgggacacagctagaacagtgctcaaaggaagtttctagtgctatatggctacactaagaagctagaaagatctcaaatgaaccgcctaacatcacacctagaggaattagaaaaacaagagcaaatcaaccccaaagctagcagaagaaaaaaagaaaaccaacatcggagctgacctgaatgaaatggagacgtaaaaaaccatacaaaagatcaatgaaacccaaagttgattttttaaaaaaattatttatttattatttattccataaattattggggtacaggtggtgtgtggttacataagctctttagtggtgatttgtgattttggtgcacccatcacctgagcagtatacactacaccctacttgttgtattttatccctcgcccccgccaactcgtccccctaagtccccaaagtccattgtatcattcttacgcctttgcgtcctcatagcttagctcccacatatcagtgagaacatacgatgtttggttttccattcctgagttacttcagttagaataacagtctccggtctcatccaggtcacggcaaatgctgttaattcatacaaggttgatatttttgaaagcataaataacatgggaagaccactagctagattaataaagaaaaaaagacaagatccaaataaacacaatcagaaatgacaaaggtgacattaccactgacccacagatatacaagaaaccctgagactattccacatgcctctatgcacacaaactagaaaactagaagaaatagagaaattcctggaaacataaaacctctcaagattgaaccaggaagaaatggaaaccctgaacaaaccaacgatgagttccaaaattgagttagtcatacaaaacctaccaaccagcacaaaaaaccttagactagacggattcacagtcgaatcctaccagatgtgtaaagaaaagccggcaccaatcctactgaaattattccacacaattgaggaggagcaactgctctctaactcattctatgaggtcagagtcattctgataccgaaacctggcagagacacaacgaaaaaaggaaaataggtaaagtaatacatatgttaatgatcttgatttagccattctacggtatatacatatttcaaaacaatatgtacatgataaatatgtacaatttgtcaattaaaaatatataaaaggaataggaaaaaattcaaatggcacagaatttgaaaggagaagatacagaacaaactccggtgtcttctttattcaactatatatacacacattcaatggactgggagcagtggctcaagcctgtaatcacagcactttgggaggtcaaggcgggcagatcacctgaggtcgggagttcgagaccagcctgaccaacagggagaaaccccagctctactaaaaatacaaaattagccgggcatggtggcgcatgcctgtaatcccagctactcggaaggctgaggcaggagaatcgcttgaactcaagaggtggaggttgtggtgagccgagatggcaccattgcactccagcctgggcaacaagagcgaaactcagtctcaaaaaaagaaaaaaaaggatttaatgaatgaatgatgagactgttggttacatctcccaccttctccctctcactccactgcagccacacggggctcctcactgttcccgtagcagcaggcatgtgcccccactgggcctctgtactggctgttcccactgcccgaacaccctcatgcaccatctgcactgtccaatacggccgcctctggccacacatggctactgagcagttgaacatggctggtccaaaccaacatttccaagacgtcgtatggtaaaaaataacataaaatcttgcaaaaatgtttctattgattatgttaaaattatgatgttttaggtatattaggttaaatcagctattttatccaaatgaatctcgcctgtttgtttttgctttttttttttttttttttttttgagatggaggctcgctctgtcgcccaggctagagtacaatggcgtggtctcggctcactgcatcactgcaacctctacctcccaggttcaagcgattctcctacctcaccctcccaagtggctgggattacaggcgtgtgccaccacacccagctaatttttgtatttttagtagagacagggtttcaccatgttggccaggctggtctcgaactgctgacctcgtgatctacctgcctcggcctcccaaagtcctgggattacaggtgtgggccactgcgccagccatgtttctcgacttctgctggcaagcatgttccagtatttgcatggctcctagccctcatctccatttctctgcacagatgttaccttccccatgaggtctgccttatacatgaggcctgtattataaactgcaactccgcattccccaaccccgttgtttcttctctccagaacactaggcaccatctgatctcctatgccttttccttattgtcagatactgaactctcagatacagttccccttcctccctccagggggcgccatggaacgcagggccctcactggccctggggactgggtgacgacaggggggagcctctggtgattggctccctcaccctgcgtaagatcaaagggactaaaggacagccccgacacccggagccattgtggctcaggccggttgcgcctgccctcgggccctcacggaggcgggggttccagggcacgagttcgaggccagcctggtccacatgggtcggaaaaaaggacttttttttatcgttcccaatataacgacaaaacataaagggaggacgccttgataggaagaaatgacatcttcctaagtgtttttaaattacttccatgtgtcttttttttttttttttttgggagaccgagccttgccctgttgcccaggctggagtgcagtggtgtgatcttcgctcactgcaacctccgcctcgtcggttcaagggagtctcctatctaagcctcctgagtagctgggattacagtcgcctgccaagagatggggtttcgccatgttgaccaggctggtcttgaacacctggcctcaaatgatccactcgccttggtctcccaaagtggtaggatgacaggcgtgagccaccgcgcccagcctcttctattcttttagagacagggtctcactgtgttgcccaggctggagtgcattgatgtgatgtgtgatcatagctcattgcagccctgaccatccgagctcaagcaatccttctgcctcagcctcctgagtagctggggccgcagatgtgcaccactgcacctggctaatttttaacatttttgtggagccagagtctgtataaaataaagtgtaaatagtaccataaataaagaatacatagtaccattttatagtagtataaaacggacattagaaactctgaacttaaaggttaaaaaaatacacaaaagtagttctcaagttctagagacttggagaatccaggaatcaacaatgtcgtggaactcctacagcctttcataaagaatggccctcgaggaaagtggaattgtcagtgggcattgtgttcgtgcctcagctaaacacggcaggaatttatttataacctagtgtaacatcctcgaggcactgttcaattagtcaagcaattgtaaaattctcccagtcttagaaaagatacaggtgtgtgtccctctgctgtggctgtgcactgaggcttcggtaaaggttgccgtctaaaaccaccggcgtgcccttgaattcttttttttttttttttctttttcagacggagtcgcactctatcacccaggctggagtgcagtgacacgatctctgttcactgcaacctccgcctcccgggttcaagcgattcccctgcctcagcctcctgaacagctgggattacaggcacccgtccccatgcccgggtaatttttgtatatttagtagagatggggtttcaccatg[135 bp omitted]gggctaagcctcaattttggggctcgcctgtgctgcatcagcttcacacctagagaagagagtgaaagagaagggagagccgtccttttgggctgccttgaaataaaggttgacccatgggttcatgtattgtcattcattctcattttctcttcctctctttctctctctcccctgccccttaagttagcttttctacaccctacctggataaggataagaaatagaaggaggggacactttaggatgctacacaataaaatacaacaacaacaacaataacagcagcagcaacaacaacaacagcaacaaaaggggaagaaacaaatctggccactgcacattcctccttgccaacaaaaagccgcggatgcaaaaagctgcccttcactgcatagacagaacagggcgcgctcgagctatgaatctcgaaaattactcaaaccatcagcctctgcaagaagcaaagtggacggccgggcgcggcggctcactcctggaatcccagcactttgggagcccgaggtgggcggatcacgaggtcaggagatcgagactgttctggctaaaccagtgaaaccccctctctactaaaaaaataagaaaagcgaagtgcatctcccataaacgaggtactgcaggaagaaagcagaaaatgagacccgagtacacacatgcacgcgggcgcgcgcacacacacaccagaagaaatgaaccaagaggaaaggaaacattttcaaataagcatttggagatgggaaaaacaccttgaaacagaaattcataaagcacagaatttttttttaagttaaaaaaggaacaataatagacagaaaatgaatgaaaaattaaatgtcatatcagaagtgaagataaattaaaagtggtcaaaggagaagagatctaaatgcaaacttaagaaggggcaatttttttttttttttttttgagacgcagcctcactctgtcgcccaggctggagtgcagtggcgtgatcttggctcactgaaacctctgcctcctggattcaagcgattctcctgcctcagcctcccaagtggctgggattacaggcatgagccaccatgcccggcctagagtcatcatggaaattaaacaacctgcttccaaatgacttttgggtaaagactgaatttaaggcagaaataaaaaaattatttgaaactaatgaaaacaaacatacaacatcccagaatctctgggacacagctagaacagtgctcaaaggaagtttctagtgctatatggctacactaagaagctagaaagatctcaaatgaaccgcctaacatcacacctagaggaattagaaaaacaagagcaaatcaaccccaaagctagcagaagaaaaaaagaaaaccaacatcggagctgacctgaatgaaatggagacgtaaaaaaccatacaaaagatcaatgaaacccaaagttgattttttaaaaaaattatttatttattatttattccataaattattggggtacaggtggtgtgtggttacataagctctttagtggtgatttgtgattttggtgcacccatcacctgagcagtatacactacaccctacttgttgtattttatccctcgcccccgccaactcgtccccctaagtccccaaagtccattgtatcattcttacgcctttgcgtcctcatagcttagctcccacatatcagtgagaacatacgatgtttggttttccattcctgagttacttcagttagaataacagtctccggtctcatccaggtcacggcaaatgctgttaattcatacaaagttgatatttttgaaagcataaataacatgggaagaccactagctagattaataaagaaaaaaagacaagatccaaataaacacaatcagaaatgacaaaggtgacattaccactgacccacagatatacaagaaaccctgagactattccacatgcctctatgcacacaaactagaaaactagaagaaatagagaaattcctggaaacataaaacctctcaagattgaaccaggaagaaatggaaaccctgaacaaaccaacgatgagttccaaaattgagttagtcatacaaaacctaccaaccagcacaaaaaaccttagactagacggattcacagtcgaatcctaccagatgtgtaaagaaaaggcggcaccaatcctactgaaattattccacacaattgaggaggagcaactgctctctaactcattctatgaggtcagagtcattctgataccgaaacctggcagagacacaacgaaaaaaggaaaataggtaaagtaatacatatgttaatgatcttgatttagccattctacggtatatacatatttcaaaacaatatgtacatgataaatatgtacaatttgtcaattaaaaatatataaaaggaagaggaaaaaattcaaatggcgtagaatttgaaaggagaagatacagaacaaactccagtgtcttattattcaactatatatacacacgttcaatggaccgggagcagtggctcaagcctgtaatcacagcactttgggaggtcaaggcgggcagatcacctgaggtcgggagttcgagaccagcctgaccaacagagagaaaccccagctctactaaaaatacaaaattagccgggcatggtgacgcatgcctgtaatcccagctactcgggagggtgaggcaggagaatcgcttgaactcaagaggtggaggttgtggtgagccgagatggcaccattgcactccagcctgggcaacaagagcgaaactcagtctcaaaaaaaaaaaaaaaaagaaaaaggatttaatgaatgaatgatgagaccgttggtgacatctcccaccttctccctctcactccactgcagccacacggggctcctcactgttcccgtagcagcaggcatgtgcccccacagggcctctgtactggctgttcccactgcccgaacaccctcatgcaccatctgcactgtccaatacggccgcctctggccacacatggctactgagcagttgaacatggctggtccaaaccaagatttccaagacgtcgtgtggtaaaaaaaacaacataaaattttgcaaaaatgtttctattgattatgttaaaattatgatgttttaggtatattaggttaaatcagctattttataaaaatgaatctcgcctgtttgtttttgctttttttttttttttttttttttttttgagatggagtctcgctctgtcgcccaggctagagtacaatggcgtggtctcagctcactgcatcactgcaacctctacctcccaggttcaagcgattctcctacctcaccctcccaagtgggtgggattacaggcgtgtgccaccacacccagctaatttttgtatttttgtagagacagggtttcaccatgttggccaggctggtctcgaactgctgacctcgtgatctacctgcctcggcctcccaaagtcctgggattacaggtgtgggccactgcgccggccatgtttctcgacttctgctggcaagcatgttccagtatttgcatggctcctagccctcatctccatttctctgcacagatgttatcttccccatgaggtctgccttatacatgaggcctgtattataaagtgcaactgccaattcgccaaccccgttgtttcttctctccagaacactaggcaccatctgatctcctatgccttttccttattgtcagatactgaactctcagatacagttccccttcatccctccagggggcgccatggaacgcagggccctcactggccctggggactgggtgacgtcaggggtgagcctctggtgattggctccctcaccctgcgtaagatcaaagggcctaaaggtcagccccgacacccggagctattgtggctccggccggttgcgcgggccctcggaccctcagagaggcgagggttcgagggcacgagttcgaggccaacctggtccacatgggttgaaaaaaaaattttttttatcgttcccaatataacaacaaaacataaagggaggacgccttgataggaagaaatgacatcttcctaagtgtttttaaattacttcaatgtatctttctttttttttttttttttttgggagaccgaggcttgctctgttgcccaggctggagtgcagtggtgtgatcttggctcactgcaacctctgcctcgtcggttcaagggagtctcctatctcagcctcctgagtagctgggattacagtcgcctgccaagagatggggtttcgccatgttgaccaggctggtcttgaacacctggcctcaaatgatccactcgccttggtctcccaaagtggtaggatgacaggcgtgagccaccgcgcccagcctcttctattcttttagagacagcgtctcactctgttgcccaggctggagtgcattgatgtgatgtgtgatcatagctcattgcagccctgaccatccgagctcaagcaatccttctgcctcagcctcctgagtagctggggccgcagatgtgcaccactgcacctggctaatttttaacattttttgtggagccagagtctgtataaaataaagtgtaaatagtaccataaataaagaatacatagtaccattttatagtagtataaaacggacattagaaactctggacttaaagtttaaaaaaatacacaaaagtagttctcaagttctagagacttggagaatccaggaatcaacaatgtcgtggaactcctacagcctttcataaagaatggccctcgaggaaagtggaattgtcagtgggcattgtgttcgtgcctcagctaaacacggcaggaatttatttataacctagtgtaacatcctcgaggcactgttcaattagtcaagcaattgtaaaattctcccagtcttagaaaagatacaggtgtgtgtccctctgctgtggctgtgcactgacgcttcagtaaaagttgccgtctaaaaccaccggcctgcccttgaattgttttgttttgttttgttttgttttgttttgttttgttttgtttttttgattcgcagcctcactctatcacccaggctggagtgcagtgacacgatctctgttcactgcaacctccgcctcccgggttcaagcgattcccctgcctcagcctcctgaacagctgggattacaggcacccgtccccatgcccgggtaatttttgtatatttagtagagatggggtttcaccatg[136 bp omitted]ggctaagcctcaattttggggctcgcctgtgctgcatcagcttcacacctagagaagagagtgaaagagaagggagagccgtccttttgggctgccttgaaataaaggttgacccatgggttcatgtattgtcattcattctcattttctcttcctctctttctctctctcccctgccccttaagttagcttttctacaccctacctggataaggataagaaatagaaggaggggacactttaggatgctacaaaataaaatacaacaacaacaacaataacagcagcagcaacaacaacaacagcaacaaaaggggaagaaacaaatctggccactgcacattcctccttggcaacaaaaagccgcggatgcaaaaagctgcccttcactgcatagacagaacagggcgcgctcgagctatgaatctcggaaattactcaaaccatcagcctctgcaagaagcaaagtggacggccgggcgcggtggctcactcctggaatcccagcactttgggagcccgaggtgggcggatcacgaggtcaggagatcgagactgttctggctaaaccagtgaaaccccctctctactaaaaaaataacaaaagcgaagtgcatctcccataaacgaggtactgcaggaagaaagcagaaaatgagacccgagtacacacatgcacgcgggcgcgcgcacacacacaccagaagaaatgaaccaagaggaaaggaaacattttcaaataagcatttggagatgggaaaaacaccttgaaacagaaattcataaagcacagaatttttttttaagttaaaaaaggaacaataatagacagaaaatgaacgaaaaattaaatgtcatatcagaagtgaagataaattaaaagtggtcaaaggagaagagatctaaatgcaaacttaagaaggggcaatttttttttttttttttttttttgagacgcagcctcactctgtcgcccgggctggagtgcagtggcgtgatcttggctcactgaaacctctgcctcctggattcaagcgattctcctgcctcagcctcccaagtggctgggattacaggcatgagccaccatgcccggcctagagtcatcatggaaattaaacaacctgcttccaaatgacttttgggtaaagactgaatttaaggcagaaataaaaaaattatttgaaactaatgaaaacaaacatacaacatcccagaatctctgggacacagctagaacagtgctcaaaggaagtttctagtgctatatggctacactaagaagctagaaagatctcaaatgaaccgcctaacatcacacctagaggaattagaaaaacaagagcaaatcaaccccaaagctagcagaagaaaaaaaaaaaccaacatcggagctgacctgaatgaaatggagacgtaaaaaaccatacaaaagatcaatgaaacccaaagttgattttttaaaaaaattatttatttattatttattccataaattattggggtacaggtggtgtgtggttacataagctctttagtggtgatttgtgattttggtgcacccatcacctgagcagtatacactacaccctacttgttgtattttatccctcgcccccgccaactcgtccccctaagtccccaaagtccattgtatcattcttacgcctttgcgtcctcatagcttagctcccacatatcagtgagaacatacgatgtttggttttccattcctgagttacttcagttagaataacagtctccggtctcatccaggtcacggcaaatgctgttaattcatacaaagttgatatttttgaaagcataaataacatgggaagaccactagctagattaataaagaaaaaaagacaagatccaaataaacacaatcagaaatgacaaaggtgacattaccactgacccacagatatacaagaaaccctgagactattccacatgcctctatgcacacaaactagaaaactagaagaaatagagaaattcctggaaacataaaacctctcaagattgaaccaggaagaaatggaaaccctgaacaaaccaacgatgagttccaaaattgagttagtcatacaaaacctaccaaccagcacaaaaaaccttagactagacggattcacagtcgaatcctaccagatgtgtaaagaaaaggcggcaccaatcctactgaaattattccacacaattgaggaggagcaactgctctctaactcattctatgaggtcagagtcattctgataccgaaacctggcagagacacaacgaaaaaaggaaaataggtaaagtaatacatatgttaatgatcttgatttagccattctacggtatatacatatttcaaaacaatatgtacatgataaatatgtacaatttgtcaattaaaaatatataaaaggaataggaaaaaattcaaatggcacagaatttgaaaggagaagatacagaacaaactccggtgtcttctttattcaactatatatacacacattcaatggactgggagcagtggctcaagcctgtaatcacagcactttgggaggtcaaggcgggcagatcacctgaggtcgggagttcgagaccagcctgaccaacagggagaaaccccagctctactaaaaatacaaaattagccgggcatggtggcgcatgcctgtaatcccagctactcggaaggctgaggcaggagaatcgcttgaactcaagaggtggaggttgtggtgagccgagatggcaccattgcactccagcctgggcaacaagagcgaaactcagtctcaaaaaaagaaaaaaaaggatttaatgaatgaatgatgagactgttggttacatctcccaccttctccctctcactccactgcagccacacggggctcctcactgttcccgtagcagcaggcatgtgcccccactgggcctctgtactggctgttcccactgcccgaacaccctcatgcaccatctgcactgtccaatacggccgcctctggccacacatggctactgagcagttgaacatggctggtccaaaccaacatttccaagacgtcgtatggtaaaaaataacataaaatcttgcaaaaatgtttctattgattatgttaaaattatgatgttttaggtatattaggttaaatcagctattttatccaaatgaatctcgcctgtttgtttttgctttttttttttttttttttttttgagatggaggctcgctctgtcgcccaggctagagtacaatggcgtggtctcggctcactgcatcactgcaacctctacctcccaggttcaagcgattctcctacctcaccctcccaagtggctgggattacaggcgtgtgccaccacacccagctaatttttgtatttttagtagagacagggtttcaccatgttggccaggctggtctcgaactgctgacctcgtgatctacctgcctcggcctcccaaagtcctgggattacaggtgtgggccactgcgccagccatgtttctcgacttctgctggcaagcatgttccagtatttgcatggctcctagccctcatctccatttctctgcacagatgttaccttccccatgaggtctgccttatacatgaggcctgtattataaactgcaactccgcattccccaaccccgttgtttcttctctccagaacactaggcaccatctgatctcctatgccttttccttattgtcagatactgaactctcagatacagttccccttcctccctccagggggcgccatggaacgcagggccctcactggccctggggactgggtgacgacaggggggagcctctggtgattggctccctcaccctgcgtaagatcaaagggactaaaggacagccccgacacccggagccattgtggctcaggcaggttgcgcctgccctcgggccctcacggaggcgggggttccagggcacgagttcgaggccagcctggtccacatgggtcggaaaaaaggacttttttttatcgttcccaatataacgacaaaacataaagggaggacgccttgataggaagaaatgacatcttcctaagtgtttttaaattacttccatgtgtcttttttttttttttttttgggagaccgagccttgctctgttgcccaggctggagtgcagtggtgtgatcttcgctcactgcaacctccgcctcgtcggttcaagggagtctcctatctaagcctcctgagtagctgggattacagtcgcctgccaagagatggggtttcgccatgttgaccaggctggtcttgaacacctggcctcaaatgatccactcgccttggtctcccaaagtggtaggatgacaggcgtgagccaccgcgcccagcctcttctattcttttagagacagggtctcactgtgttgcccaggctggagtgcattgatgtgatgtgtgatcatagctcattgcagccctgaccatccgagctcaagcaatccttctgcctcagcctcctgagtagctggggccgcagatgtgcaccactgcacctggctaatttttaacattttttgtggagccagagtctgtataaaataaagtgtaaatagtaccataaataaagaatacatagtaccattttatagtagtataaaacggacattagaaactctggacttaaagtttaaaaaaatacacaaaagtagttctcaagttctagagacttggagaatccaggaatcaacaatgtcgtggaactcctacagcctttcataaagaatggccctcgaggaaagtggaattgtcagtgggcattgtgttcgtgcctcagctaaacacgacaggaatttatttataacctagtgtaacatcctcgaggcactgttcaattagtcaagcaattgtaaaattctcccagtcttagaaaagatacaggtgtgtgtccctctgctgtggctgtgcactgacgcttcagtaaaagttgccgtctaaaaccaccggcctgcccttgaattgttttgttttgttttgttttgtttttttgattcgcagcctcactctatcacccaggctggagtgcagtgacacgatctctgttcactgcaacctccgcctcccgggttcaagcgattcccctgcctcagcctcctgaacagctgggattacaggcacccgtccccatgcccgggtaatttttgtatatttagtagagatggggtttcaccatg[136 bp omitted]ggctaagcctcaattttggggctcgcctgtgctgcatcagcttcacacctagagaagagagtgaaagagaagggagagccgtccttttgggctgccttgaaataaaggttgacccatgggttcatgtattgtcattcattctcattttctcttcctctctttctctctctcccctgccccttaagttagcttttctacaccctacctggataaggataagaaatagaaggaggggacactttaggatgctacaaaataaaatacaacaacaacaataacagcagcagcaacaacaacaacagcaacaaaaggggaagaaacaaatctggccactgcacattcctccttgccaacaaaaagccgcggatgcaaaaagctgcccttcactgcatagacagaacagggcgcgctcgagctatgaatctcggaaattactcaaaccatcagcctctgcaagaagcaaagtggacggccgggcgcggtggctcactcctggaatcccagcactttgggagcccgaggtgggcggatcacgaggtcaggagatcgagactgttctggctaaaccagtgaaaccccctctctactaaaaaaataacaaaagcgaagtgcatctcccataaacgaggtactgcaggaagaaagcagaaaatgagacccgagtacacacatgcacgcgggcgtgcgcacacacacaccagaagaaatgaaccaagaggaaaggaaatattttcaagtaagcatttggagatgggaaaaacaccttgaaacagaaattcataaagtacacacatgttttttttttaagttaaaagaggaacaataataaacaggcagaaaatgaataaaaaataaaatgtcatatcagaagtgaagataaattaaaagtggtcaaaggagaagagatctaaatgcaaacttaagaaggggcaatttttttttttttttttttgagacgcagcctcactctgtcgcccgggctggagtgcagtggcgtgatcttggctcactgaaacctctgcctcctggattcaagcgattctcctgcctcagcctcccaagtggctgggattacaggcatgagccaccatgcccggcctagagtcatcatggaaattaaacaacctgcttccaaatgacttttgggtaaagactgaaattaaggcagaaataaaaaaattatttgaaactaatgaaaacaaacatacaacatcccagaatctctgggacacagctagaacagtgctcagaggaagtttctagtgctatatggctacattaagaagctagaaagatctcaaatgaaccgcctaacatcacacctagaggaattagaaaaacaagagcaaatcaaccccaaagctagcagaagaaaaaaaaaaaaaacaaaatcagagctgagctgaatgaaattgagatgtaaaataccatacaaaagatcaatgaaacccaaagttgattttttaaaaaaattatttatttattatttattccataaattattggggtacaggtggtatgtggttacataagctctttagtggtgatttgtgattttggtgcacccatcacctgagcagtatacactaccccctatttgttgtcttttatccctcgccctcgccaactcgtccccctaagtccccaaagtccattgtatcattcttatgcctttgtgtcctcatagcttaggtcccacatatcagtgagaacatacgatgtttggttttccattcctgagttacttcacttagaataatactctccggtctcatccaggtcactgcaaatgctgttaattcatacaaagttgatatttttggaagcataaataacatggaaagaccactagctagattaataaagaaaaaaagacaagatccaaataaacacaatcagaaatgacagaggtgacattaccactgacccacagacatacaagaaaccctgagactattccacatgcctctatgcacaaaagctagaaaactagaagaaatagagaaattcctggaaacataaaacctctcaagattgaaccaggaagaaatggaaaccctgaacaaaccaacgatgagttccaaaattgagttagtcatacaagacctaccaaccagcgcaaaaaaccttagactagacggattcacagtcgaattctaccagatgtgtaaagaaaagccggcaccaatcctactgaaattattccacacaattgaggaggagcaactgctctctaactcattctatgaggtcagagtcattctgataccgaaacctggcagagacacaacgaaaaaaggaaaataggtaaagtaatacatatgttaatgatcttgatttagccattctacggtatatacatatttcaaaacaatatgtacatgataaatatgtacaatttgtcaattaaaaatatataaaaggaagaggaaaaaattcaaatggcgtagaatttgaaaggagaagatacagaacaaactccagtgtcttctttattcaactatatatacacacgttcaatggaccgggagcagtggctcaagcctgtaatcacagcactttgggaggtcaaggcgggcagatcacctgaggtcgggagttcgagaccagcctgaccaacagagagaaaccccaggtctactaaaaatacaaaattagccgggcatggtgacgcatgcctgtaatcccagctactcgggagggtgaggcaggagaatcgcttgaactcaagaggtggaggttgtggtgagccgagatggcaccattgcactccagcctgggcaacaagagcgaaactcagtctcaaaaaaaaaaaaaaaaaaaaaaaaaaggatttaatgaatgaatgatgagaccgttggtgacatctcccaccttctccctctcactccactgcagccacacggggctcctcactgttcccgtagcagcaggcatgtgcccccacagggcctctgtactggctgttcccactgcccgaacaccctcatgcaccatctgcactgtccaatacggccgcctctggccacacatggctactgagcagttgaacatggctggtccaaaccaagatttccaagacgtcgtgtggtaaaaaaaacaacataaagttttgcaaaaatgtttctattgattatgttaaaattatgatgttttaggtatattaggttaaatcagctattttatcaaaatgaatctcgcctgtttgtttttgctttttttttttttttttttttttttgagatggagtctcgctctgtcgcccaggctagagtacaatggcgtggtctcagctcactgcatcactgcaacctctacctcccaggttcaagcgattctcctacctcaccctcccaagtggctgggattacaggcgtgtgccaccacacccagctaatttttgtatttttgtagagacagggtttcaccacgttggccaggctggtctcgaactgctgacctcgtgatctacctgcctcggcctcccaaagtcctgggattacaggtgtgggccactgcgccggccatgtttctcgacttctgctggcaagcatgttccagtatttgcatggctcctagccctcatctccatttctctgcacagatgttatcttccccatgaggtctgccttatacatgaggcgtgtattataaagtgcaactgccaattcgccaaccccgttgtttcttctctccagaacactaggcaccatctgatctcctatgccttttccttattgtcagatactgaactctcagatacagttccccttcctccctccagggggcgccatggaacgcagggccctcactggccctggggactgggtgacgtcaggggtgagcctctggtgattggctccctcaccctgcgtaagatcaaagggcctaaaggtcagccccgacacccggagccattgtggctccggccggttgcgcgggccctcggaccctcagagaggcgagggttcgagggcacgagttcgaggccaacctggtccacatgggttgaaaaaaaaatttttttatcgttcccaatataacaacaaaacataaagggaggacgtcttgataggaagaaatgacatcttcctaagtgtttttaaattacttcaatgtatctttcttttttttttttttttgggagaccgaggcttgctctgttgcccaggctggagtgcagtggtgtgatcttggctcactgcaacctctgcctcgtcggttcaagggagtctcctatctcagcctcctgagtagctgggattacagtcgcctgccaagagatggggtttcgccatgttgaccaggctggtcttgaacacctggcctcaaatgatccactcgccttggtctcccaaagtgctaggatgacaggcgtgagccaccgcgcccagcctcttctattcttttagagacagggtctcactctgttgcccaggctggagtgcattgatgtgatgtgtgatcatagctcattgcagccctgaccatccgagctcaagcaatccttctgcctcagcctcctgagtagctggggccgcagatgtgcaccactgcacctggctaatttttaacattttttgtggagccagagtctgtataaaataaagtgtaaatagtaccataaataaagaatacatagtaccattttatagtagtataaaacggacattagaaactctggacttaaagtttaaaaaaatacacaaaagtagttctcaagttctagagacttggagaatccaggaatcaacaatgtcgtggaactcctacagcctttcataaagaatggccctcgaggaaagtggaattgtcagtgggcattgtgttcgtgcctcagctaaacacggcaggaatttatttataacctagtgtaacatcctcgaggcactgttcaattagtcaagcaattgtaaaattctcccagtcttagaaaagatacaggtgtgtgtccctctgctgtggctgtgcactgacgcttcagtaaaagttgccgtctaaaaccaccggcctgcccttgaattgttttgttttgttttgttttgttttgttttgttttgtttttttgattcgcagcctcactctatcacccaggctggagtgcagtgacacgatctctgttcactgcaacctccgcctcccgggttcaagcgattcccctgcctcagcctcctgaacagctgggattacaggcacccgtccccatgcccgggtaatttttgtatatttagtagagatggggtttcaccatg[136 bp omitted]ggctaagcctcaattttggggctcgcctgtgctgcatcagcttcacacctagagaagagagtgaaagagaagggagagccgtccttttgggctgccttgaaataaaggttgacccatgggttcatgtattgtcattcattctcattttctcttcctctctttctctctctcccctgccccttaagttagcttttctacaccctacctggataaggataagaaatagaaggaggggacactttaggatgctacaaaataaaatacaacaacaacaacaataacagcagcagcaacaacaacaacagcaacaaaaggggaagaaacaaatctggccactgcacattcctccttgccaacaaaaagccgcggatgcaaaaagctgcccttcactgcatagacagaacagggcgcgctcgagctatgaatctcggaaattactcaaaccatcagcctctgcaagaagcaaagtggacggccgggcgcggtggctcactcctggaatcccagcactttgggagcccgaggtgggcggatcacgaggtcaggagatcgagactgttctggctaagccagtgaaaccccctctctactaaaaaaataacaaaagcgaagtgcatctcccataaacgaggtactgcaggaagaaagcagaaaatgagacccgagtacacacatgcacgcgggcgtgcgcacacacacaccagaagaaatgaaccaagaggaaaggaaatattttcaagtaagcatttggagatgggaaaaacaccttgaaacagaaattcataaagtacacacatgttttttttttaagttaaaagaggaacaataataaacaggcagaaaatgaataaaaaataaaatgtcatatcagaagtgaagataaattaaaagtggtcaaaggagaagagatctaaatgcaaacttaagaaggggcaatttttttttttttttttttgagacgcagcctcactctgtcgcccgggctggagtgcagtggcgtgatcttggctcactgaaacctctgcctcctggattcaagcgattctcctgcctcagcctcccaagtggctgggattacaggcatgagccaccatgcccggcctagagtcatcatggaaattaaacaacctgcttccaaatgacttttgggtaaagactgaaattaaggcagaaataaaaaaattatttgaaactaatgaaaacaaacatacaacatcccagaatctctgggacacagctagaacagtgctcagaggaagtttctagtgctatatggctacattaagaagctagaaagatctcaaatgaaccgcctaacatcacacctagaggaattagaaaaacaagagcaaatcaaccccaaagctagcagaagaaaaaaaaaaaacaaaatcagagctgagctgaatgaaattgagatgtaaaataccatacaaaagatcaatgaaacccaaagttgattttttaaaaaaattatttatttattatttattccataaattattggggtacaggtggtatgtggttacataagctctttagtggtgatttgtgattttggtgcacccatcacctgagcagtatacactaccccctatttgttgtcttttatccctcgccctcgccaactcgtccccctaagtccccaaagtccattgtatcattcttatgcctttgtgtcctcatagcttaggccccacatatcagtgagaacatacgatgtttggttttccattcctgagttacttcacttagaataatactctccggtctcatccaggtcactgcaaatgctgttaattcatacaaagttgatatttttggaagcataaataacatggaaagaccactagctagattaataaagaaaaaaagacaagatccaaataaacacaatcagaaatgacagaggtgacattaccactgacccacagacatacaagaaaccctgagactattccacatgcctctatgcacaaaaactagaaaactagaagaaatagagaaattcctggaaacataaaacctctcaagattgaaccaggaagaaatggaaaccctgaacaaaccaacgatgagttccaaaattgagttagtcatacaagacctaccaaccagcgcaaaaaaccttagactagacggattcacagtcgaattctaccagatgtgtaaagaaaagccggcaccaatcctactgaaattattccacacaattgaggaggagcaactgctctctaactcattctatgaggtcagagtcattctgataccgaaacctggcagagacacaacgaaaaaaggaaaataggtaaagtaatacatatgttaatgatcttgatttagccattctacggtatatacatatttcaaaacaatatgtacatgataaatatgtacaatttgtcaattaaaaatatataaaaggaagaggaaaaaattcaaatggcgtagaatttgaaaggagaagatacagaacaaactccagtgtcttctttattcaactatatatacacacgttcaatggaccgggagcagtggctcaagcctgtaatcacagcactttgggaggtcaaggcgggcagatcacctgaggtcgggagttcgagaccagcctgaccaacagagagaaaccccagctctactaaaaatacaaaattagccgggcatggtgacgcatgcctgtaatcccagctactcgggagggtgaggcaggagaatcgcttgaactcaagaggtggaggttgtggtgagccgagatggcaccattgcactccagcctgggcaacaagagcgaaactcagtctcaaaaaaaaaaaaaaaaaaaaaaaaaggatttaatgaatgaatgatgagaccgttggtgacatctcccaccttctccctctcactccactgcagccacacggggctcctcactgttcccgtagcagcaggcatgtgcccccacagggcctctgtactggctgttcccactgcccgaacaccctcatgcaccatctgcactgtccaatacggccgcctctggccacacatggctactgagcagttgaacatggctggtccaaaccaagatttccaagacgtcgtgtggtaaaaaaaacaacataaaattttgcaaaaatgtttctattgattatgttaaaattatgatgttttaggtatattaggttaaatcagctattttatcaaaatgaatctcgcctgtttgtttttgctttttttttttttttttttttttgagatggagtctcgctctgtcgcccaggctagagtacaatggcgtggtctcagctcactgcatcactgcaacctctacctcccaggttcaagcgattctcctacctcaccctcccaagtggctgggattaaaggcgtgtgccaccacacccagctaatttttgtatttttgtagagacagggtttcaccatgttggccaggctggtctcaaactgctgacctcgtgatctacctgcctcggcctcccaaagtcctgggattacaggtgtgggccactgcgccggccatgtttctcgacttctgctggcaagcatgttccagtatttgcatggctcctagccctcatctccatttctctgcacagatgttatcttccccatgaggtctgccttatacatgaggcctgtattataaagtgcaactgccaattcgccaaccccgttgtttcttctctccagaacactaggcaccatctgatctcctatgccttttccttattgtcagatactgaactctcagatacagttccccttcctccctccagggggcgccatggaacgcagggccctcactggccctggggactgggtgacgtcaggggtgagcctctggtgattggctccctcaccctgcgtaagatcaaagggcctaaaggtcagccccgacacccggagctattgtggctccggccggttgcgcgggccctcggaccctcagagaggcgagggttcgagggctcgagttcgaggccaacctggtccacatgggttgaaaaaaaaattttttttatcgttcccaatataacaacaaaacataaagggaggacgccttgataggaagaaatgacatcttcctaagtgtttttaaattacttcaatgtatctttctttttttttttttttttgggagaccgaggcttgctctgttgcccaggctggagtgcagtggtgtgatcttggctcactgcaacctctgcctcgtcggttcaagggagtctcctatctcagcctcctgagtagctgggattacagtcgcctgccaagagatggggtttcgccatgttgaccaggctggtcttgaacacctggcctcaaatgatccactcgccttggtctcccaaactggtaggatgacaggcgtgagccaccgcgcccagcctcttctattcttttagagacagcgtctcactctgttgcccaggctggagtgcattgatgtgatgtgtgatcatagctcattgcagccctgaccatccgagctcaagcaatccttctgcctcagcctcctgagtagctggggccgcagatgtgcaccactgcacctggctaatttttaacattttttgtggagccagagtctgtataaaataaagtgtaaatagtaccataaataaagaatacatagtaccattttatagtagtataaaacggacattagaaactctggacttaaagtttaaaaaaatacacaaaagtagttctcaagttctagagacttggagaatccaggaatcaacaatgtcgtggaactcctacagcctttcataaagaatggccctcgaggaaagtggaattgtcagtgggcattgtgttcgtgcctcagctaaacacggcaggaatttatttataacctagtgtaacatcctcgaggcactgttcaattattcaagcaattgtaaaattctcccagtcttagaaaagatacatgtgtgtgtccctctgctgtggctgtgcactgacgcttcagtaaaagttgccgtctaaaaccaccggcctgcccttgaattgttttgttttgttttgttttgttttgttttgtttttttgattcgcagcctcactctatcacccaggctggagtgcagtgacacgatctctgttcactgcaacctccgcctcccgggttcaagcgattcccctgcctcagcctcctgaacagctgggattacaggcacccgtccccatgcccgggtaatttttgtatatttagtagagatggggtttcaccatg[136 bp omitted]ggctaagcctcaattttggggctcgcctgtgctgcatcagcttcacacctagagaagagagtgaaagagaagggagagccgtccttttgggctgccttgaaataaaggttgacccatgggttcatgtattgtcattcattctcattttctcttcctctctttctctctctcccctgccccttaagttagcttttctacaccctacctggataaggataagaaatagaaggaggggacactttaggatgctacaaaataaaatacaacaacaacaacaataacagcagcagcaacaacaacaacagcaacaaaaggggaagaaacaaatctggccactgcacattcctccttggcaacaaaaagccgtggatgcaaaaagctgcccttcactgcatagacagaacagggcgcgctcgagctatgaatctcggaaattactcaaaccatcagcctctgcaagaagcaaagtggacggccgggcgcggtggctcactcctggaatcccagcactttgggagcccgaggtgggcggatcacgaggtcaggagatcgagactgttctggctaaaccagtgaaaccccctctctactaaaaaaataacaaaagcgaagtgcatctcccataaacgaggtactgcaggaagaaagcagaaaatgatacccgagtacatacatgcacgcgggcgtgcgcacacacacaccagaagaaatgaaccaagaggaaaggaaatattttcaagtaagcatttggagatgggaaaaacaccttgaaacagaaattcataaagtacacacatgttttttttttaagttaaaagaggaaccataataaacaggcagaaaatgaataaaaaataaaatgtcatatcagaagtgaagataaattaaaagtggtcaaaggagaagagatctaaatgcaaacttaagaaggggcaattttttttttttttttgagacgcagcctcactctgtcgcccgtgctggagtgcagtggcgtgatcttggctcactgaaacctctgcctcctggattcaagcgattctcctgcctcagcctcccaagtggctgggattacaggcatgagccaccatgcccggcctagagtcatcatggaaattaaacaacctacttccaaatgacttttgggtaaagactgaaattaaggcagaaataaaaaaattatttgaaactaatgaaaacaaacatacaacatcccagaatctctgggacacagctagaacagtgctcagaggaagtttctagtgctatatggctacattaagaagctagaaagatctcaaatgaaccgcctaacatcacacctagaggaattagaaaaacaagagcaaatcaaccccaaagctagcagaagaaaaaaaaaaaacaaaatcagagctgagctgaatgaaattgagatgtaaaataccatacaaaagatcaatgaaacccaaagttgattttttaaaaaaattatttatttattatttattccataaattattggggtacaggtggtatgtggttacataagctctttagtggtgatttgtgattttggtgcacccatcacctgagcagtatacactaccccctatttgttgtcttttatccctcgccctcgccaactcgtccccctaagtccccaaagtccattgcatcattcttacgcctttgtgtcctcatagcttaggtcccacatatcagtgagaatatacgatgtttggttttccattcctgagttacttcacttagaataatactctccggtctcatccaggtcactgcaaatgctgttaattcatacaaagttgatatttttggaagcataaataacacggaaagaccactagctagattaataaagaaaaaaagacaagatccaaacaaacacaatcagaaatgacaaaggtgacattaccactgacccacagacatacaagaaaccctgagactatttcgcatgcctctatgcacacaaactagaaaactagaagaaatagataaattcctggaaacataaaacctctcaagattgaaccaggaagaaatggaaaccctgaacaaaccaacgatgagttccaaaattgagttagtcatacaaaacctaccaaccagcacaaaaaaccttagactagacggattcacagtcgaatcctaccagatgtgtaaagaaaagccggcaccaatcctactgaaattattccacacaattgaggaagagcaactgctctctaactcattttatgaggtcagagtcattctgataccgaaacctggcagagacacaacgaaaaaagaaaaataggtaaagtaatacatatgttaatgatcttgatttagccattctacggtatatacatatttcaaaacaatatgtacctgataaatatgtacaatttgtcaattaaaaatatataaaaggaataggaaaaaattcaaatggcgcagaatttgaaaggagaagatacagaacaaactccagtgtcttctttattcaactaactgaagcacttatttaaataattaacttgtttaatttattttaattaagttaattatttaaattatttaaacaagtgttgaattgctttagtttctgctaattgttctaaataaacagacatagaatacaaaaatcacaaaatgtcagaataaaatttcttttcacaaacatacaacaaaaacttagcaataattaatgtagtaacatagactggtttggtgtcttacatgtgtgaagaacttgtgaacagaatttgattcctcagttgaatattggttctagaatttgaggatcattattcattctgagcaatcaaagtttaacctaaaattaaacagaaaaatatttaacttaaagctagtcccagaatagcacagctaacatcacactgaactgtgaaaccttttcctctaagatcaggaagaagacaaggatgtccacttttgccactactgtttaacagaatagtggaagcccttgccagagcaattaggcaagaaaaaatagtaagaggcaaccaaactggaaaggaagaaataaattatctctgttcacagaaaacatgatcttgtgtataggaaactctaaagattctacatacaaaatgtgttagaactaatacatgaattcagcaaagttgcaggatatgaaatcaactcataaaaatcagttgcatttatatactaacaacgaagaatccaaaaaagaaacaattccatttataataacaccaaaacctcccaaagcttaggaataaatttaaccaaggaggtaaaagacttgaagttaaataagatataaataaattaaaagacattccgtgttcatggactggaagatttaatactattaagatgtcagtatggacccaaagcaatctaccaattcaatgcaattcctacaaaagttataaaggttctttgctttgttttgttttcgcagaaatagacaaatctatcctaaaattcatacggaatctcaagagactcagaatagccaaaacaggctgggcatggtggctcataccatgtaatcccagcactttgggaggctgaggcaggcagatcacctgaggtcaggagttcaaaatcagtctagccaacacggtgaaaccctgtctctaccaaaaatacaaaaattagccaggcatggtggcacatgcttgtagtcccagctacttgggaggctgaggcaggataattgcttgaatccaggagacagaggttgcagtgagctgagatggcgccactgcactccagcctgggtgacagagtaagactttgtctaaaacaaacaaaaaaatgaataggcaaaacaatcttgaaaaataagaacaaagttggaggcttcacatttcctaatttcaaaacttaatacaaaaccacagtaattaaaacagtgcggcgctggcataaagacagccacatagaccaatggaatagaatacattgaaattttctaaaggacaattttttcaatttccaacttttatgtggtttaacattcgtaagcaagtttgtgttctttgaatcactgagagcttttgagcatgtagcaatatcctgcacaaattttgcatgagtgtgttaaagacgggtaagtattaaatgtctcatgcagccggatgcagtgactcacacctataaccccagcactttgggaggccaaggcaggtggatgagttgaggtcaggagttcgagaccagcctggccaacatggtgaaaccccgtctctgttaagaatacaaaaattagctggatgtggtggtgggggcctgtaatcccaggtacttgggagtctgaggcaggggaatcacttgaatccgggaggcagaggttgcagtgagccgagattgcaccaccgcactccagcttgggtgacagagcaagactccgactcaaaaaaaaaaaaaaaaggtctcatggaggaagtcagttctgtagaatgaccccactgcaagatgctcttccagtgccaggaagtggattatgttctaggagccatgaaggagagtttacagaagcccattctccgcttcatcatcattgtaacacaatgaaagctgatgacatggctgcttggctacactgtgtttatcagcttctcctgcatttagaatgggggcatgtaactacacactctaagtaggtgcttacccaggtccagagtctccaggaataagatcaatgtagaagagcagctacagaaggagtcggttgacttgaatgacataaaaataaatcatggtaattgcttaagcctcagcattttttttgtactgtcccatttagataaatgaatagagtttgacaacagtctttcatgtctttgttggtgccaccaagctctgaaattcccaaggaacataatgtttcttcacgcgctccattctcgtaggaggctaactacgatgacgtgcaatgtgacttttccctatcttaatagctgggcccaagggtctgggaaccgatgtgagtcatacgcctttctgaaaatatttttttcaaactgtattactcctgggccctgcggaaatcattgcagaaagtatttggtatcacactgagctaacagagaagtgaacctaactcaggactctgtctcatgttcctataatcttccactctaatcactggatatcagtggtattcctagtccttgaaaactaatctttgctcaaaaccagtattcagtaggctctggaaagtttatgtatttacctttgtaatttctttctttctttctttctttctttctttctttctttctttctttctttcttttttctttctttctttcttttttctttctttctttctttctttcttttttttctgagagactagagtttcgctctagtctctcacgctggagtgcaatggcgcgatctcagttcactgcaacctccgcctcccaggctcaagcgattctcctgcctcagcctcccgagtagctgggattacaggaatgcgccaccatgctcagctaatttttgtatttttagtagagatggggtttca[143 bp omitted]agtgcctggttacccagccttgccttcactcaaggggcattgagttggtgaactgtcttgtgcctggaactgggagaaaagccatgactctagcgcg[132 bp omitted]ccgccccctcccgggttcaagcaattcccctgcctcagcctcccaagttgctggggctacaggtgtgtgccaccatgccaggctaattttttgtattttagtagagacggg[136 bp omitted]tgaattcatttctgaaaaaaacctatgattatcaccaccagatgtcgctcttgcaccagccattctctatgatctgattagtaattataccctgttgcctggtatcactttgcttcttagggattaattgccaccacctgggctcaatcacaccaggctctgcctgtctccactggaaccctgaagctcacttcaaaaagcatggctttctgctagcattcctagagcggaaaagcaagtcagccatattctttacaaaagatttcctatgctttgtgaaagattaagatgagatttatgggttcacaaagacaatgtttccgtttttttaaccataatctatagaaagaatagactttaaaatatgagctgacttctatctatccatcatctatatctttctatttaggcatccctatctatctatacaatctctaaacctttttagaaataactcatgccatacacatgaaacactctgtgtttttccatccacgtttgcagtatttttaatttaaacaatgctggttgtgctttgataaatggaagattatgactcaccatttgaaaagagctggcctaagtgtgtgtctttcttttcttttcttttcttttcttttcttttcttttcttttcttttcttttcttttcttttctttctttttttgatggagtctcactctgtcgcccaggctggagtgcagtgttgctatctcggctcgctgcagcctcagcctcccggattcaagcgatcctcctgcctcagcctcctgagtagctgggattacaggcgcctgccaccacacctggctaatttttgtattgttagtagagatggggtttcaccatgctggccgggctggtctcaaactcctgacctcaggtgatccacccgccttggcctcccagtgttgggattacaggcttggaccaccgtgcctggccctaagtgttttctaacataagcatggataggtttaagagtggagggtgggcgtttgtgtgtgtgtgtgtgtgtgtgtgtgtgtgtttgtgtgtgtgtgtgtgtgtggtcacagggcctctggacattgccatcccccttcacctctgcacctgcctaattgtcattaaactatcgggacccagcctggttgttgtcccttgtcccttcctagaagtgatccctgatcctgcaggctgagcaagggtcccgttctctggcctcctcttacccctggagtctctggtttttttttttttaaattagttaattaattaatgtatttttgagacggagtttcactctgtctcccaggctggagtgcagtggtgcaatctcagctcactgcaacctccacctcccgggttcaagtgattctcctgcctcagcctcctgagtagctgggattacaggcaggcaccaccacacccagctaatttttgtatttttagtagagacagggtttcgccatgttggccaggctggtctcgaactgctgacctcaggcgatccacctgcctcagcttcccaaagtgctgggattacaggcattagctgctgtgcccaggcatatactcactgttttcttggccattcatgaacacgtgaacagcagggaagaactggagttgttcaatgccctcatgccctgctgaggttgaacaaggtgatgctccaccttcttgtttcggctttcagtgtatacaagggtccttcaggctgggcgtggtggttcacaactgtgatcccagcactttgggatgccgacacgggcggatcacctgaggtcgggagttcgagaccagcctgaccaacatggggaaacctcgtctctactaaaaaatacaaaattagctgagtgtagtggtgcatgcctgtagtcccagctatttggaaggctgaggcagcagaattgcttgaacccgggaggcggaggttgcagtgagctgatatctcgccattgcactccagcctgggcaacaagagtgaaactctgtctcaaaaccaaccaaccaaccaaccaacaaacaaaacacacacacacacacacaaacaaaacaaaaaataaacaagtgtccttgtgatctatttagtctcatgtttttcccatttttgtattttttcttggcgatgtcactgtttaaatgactcccaagtgtagtcctaaaagcaaggggttatggcgcaccttatggagaaaatatgtgtattagagaagcttcattcagacctgcattcagccctgttggtcttgagttcagtgctaatgaatcgacattatgtattaaatgaaacatctttaaacagaaacacatataaaagaaggttatgtattagtcagttaacaaaaacattgtgaccagaggctctcaagaaactaaccttctatttcccctaaaagcaccagctcggtattcactaattcagtgtacatggctactttctagaacacatttaccacatacagcaagaattgactgcatcagcttattttagattcacaaagacctatgagacttctatctccactttacagatgaggaaactgagtcttaagagagatcaagaaacttgcccttcatcaatgatgcagcctggatagcaa[142 bp omitted]ccatctttactgaaaatacaaaaattagctgggcgtggtggcatgtgcctatagtcctagctacttgggaggctgaggcagaacaatcgcttgaacccaggaggcggaggttgcagtgagccgagatcacgccacagcactctagcctgggctacagaatgagactctgtcaaaaaacaaaaacaaaaaacaaaacaaaataaacaaaaaaacttaaggaagctcacaaagctcataggtgtttagaaaataaacgtcctctgccacgttaaaaaaaaaaaaaaaaggtatactggcagctggagtaggagacaacctgcaggggaagtacctgagcatactgttctcttcttgggatgtacgaatggggtcgatcaaggggactcgagctggggtacacactgaggtcaccaggggagctttatttagaaggtgtgatgcctgggcgccaccctaggactttctgaatgaattgatatgggcagcatactggccatggagactttttaaagttctaccgttgaatgtaaactagatcaaagttcagaagcactggggccaggcacggtggctcatgcctataatcccagcactttgggaggctgaggcgggcagatcacttgaggtcaggagttcgagaccagcctggccaacatagtgaaaccctgtgtctactaaaaatacaaaaaaattagcctggcacggtggtgcacccctgtaatcccagctactcgggatgctgaggtgggaggactgcttgaacttgggagttagaggctgcagtgacccgagatcatgccactgcgctccagcctgggtgatagagtgagactccatctcaaaagaaaaaaaaagaaaaaaaaaaaagcactgggataagcctagggctcaagagaccaggcatttcatttctttctttctttttttgactcgatggatgtttaatgatttaaaatttaatttaacttaattttagattcaggggatacgtgtgcaggtttgtgacatagatatattgcatgatgctgagatttgggcttcaatggatgccgtcacccaaatagtgaacatagcaccccacaggtaatttttcaaccctttcctcgcaccttccccccgcttttggggtcccctgtgtctattgttcccatcttttatgttcatgaggtttgtttagcaacctcttataagtgaaaacacgcagtatttggttttctgtttctgcattaattcacttagatggcctccagctgcaattatgttgctgcaaaggatacgatttcattctttgttataggagactggccatttctagtaagctgcatgctgctgtcttctttctcctttgtcttctgtattagtttgctggggctgccataaaaaagtaacacagatggggtggcttaaacgacagagatttattttctcactgttctggagggtagaagtacaggatcaaggtgacatcaaggttggtttcctcaaagcgtctctccttgccttgcagatggccacccccttagtcctcacaagggctcccctctgtgcacacacatccctggcatctctctgtctgtccaaattttctcttcttataaggacaccagtcatattggattagtgcctactctgaatacctcatcttagcttaattgcctctctaaacaccctttctccaaaaacagttgcattccgaggtcctgggggttggggcttcaacatatgaattttggaaaggacacagttcagcccataacaacatctctagccaattctgaggtattgtttgaacattacagcctacttccatctgtgttgcttggaaatagaagttatatgtcaacccatagaaaggatattgaaggggaagtcattgattcctgtggccaccatgttggtaggaaccacagtgaatgtgaggtgcccgaaggaagatgcatcttagtggatggatgcctggactctgatgtccactcatcactctccctgcaaagatttcccttttgctagaaatgctggagaaaaagagttttattttattaagaaaattgggggttactgtatatcagaccattctgacctgctgaagaatccatggctttcaggaagaagattattactgctggatgcatcgatcatgttttgtctgtatctgatagccagcagatgcaagcaaacctaacccaaagaacagaagcagaaatcagaaagcagacacagattgccccaacatttcctgctcattctctgccaggtactaaaacatctgatctggagtctgtggagacacacatcttttctgcatataaaatcagtctctctctcttttttcttttttttttttttttgagacagagtatctgtctcccacactggaatgtagtgctgcaatctcagctcattgcaacctctgcttcccgcgttcaaatgattctcctgcctcagcctcctgtgtagctggaactgcaggcacgttccaccatgcccagctaatttttgtggcctcagctacttaggaggctgaggtgggaggatgacttgagcttaggagtttgaggctgcagtgagctatgatggcaccactgcactgcagtggcatgatcataactcactgcactccagcctgagtgacagagcaagaccctgtcttaaaaaaaaaaaaaaaaaaaaaagaaatcactgatggaccaggcacagtggctcatgcctataatcccagcactttgggaggctgaggtgggcggattgtctgagctcaggagctcatgaccaacctgggcaacactgtgaaaccccgtctctactaaaatacaaaaaattagttgggcatggtggcgtgcacctgtagtcccagctactcaagaggctgaggcaggagaattgcttgaacatgggaggcggaggttgcagtgagccgagatcacaccattgcactccagcctgggcgacagagcgagaccctatctcagattaaaaaaaaaaaaaaaaaaagaaatcactgacggctgcctggagggtggattttaggaggatgtgagtggtaacagtaaaagtagcctggagactattgttgttggggctggtgctggtgacaccagtgcacctgcagacaagtagatggatttggcacgttttttgaagacagtcttggtaaaacttgtaaattagttggacgtggtagacatgggaaagagaagagtaaaaacagactcttaggtttggggctgggcaaatgggtggatggtcatgagatgggaagattatcagagttcctggcctggggatatgaagcagaattgagattctattttgttttgcatgattattcaacatccaagtaaacagatcctttatccagtttgatatatgcttttggggtttaggagataactcaggactggaaatagaaatttgtgtgtcaatgatgtatgggggatattcaagtcatgaggctttataagattcctgtgtcattcaggattcagtcaggagacagaaacgacacctgtaattcaaatggagaaaaatgtaatataaggatatattataaatggtgaaagggtattaactagaagggataaagagaatcttaagaaccctaaggaacagcagattgtaggaagaagccactacctgtaaggcagggagagggggagagagagagagagagagagagagagagagagagagagagactttagaatgtatgtgtgtgtgtgagagagagagactttagaatttatttgtgtgtgtgtgtgagagagacttcagaatttatttgtgtgtgtgtgagagagagactttagaatttatgtttgtgtaagagacagagagagactttagaatttatttttgtgtgtgtgagagagagactttagaatttatgtttgtgagagagagactttagaatttatgtttctgagagagacttttagaatttatgtttgtgagagagagactttagaatttatgtttgtgtgtgtgtgagagagagagagagactttagaatttatttttgttttattttatttttattttatttttgagatggagtctcactctgtcactcaggctggagtgcagtggcacgatcttggctcactgcaacctccgcctcctgggttcaagtggttctcctacctcagcctctggagtagctgagatcacaagtgcgcactaacacacccagctaattttcgtatttttagtagagactgggcttcaccatgttgtccaggctggtctcaaactcctgacctcaagtgatccacctacgtcagcctcccgaagtgctgggatcacaggcatgaacgactgcgcctggtcaactttagaatttatgagaccagtgtcttattcttctctttttcagatatgtgggttggttgttgttatcctatttctgtcccaacattgtatcatgatatgttggggaaaaggactaaaatgtgtatttttagttcagaagtctccaaataaggatagtacaaaggttgacttgatgcggatcgcaagatcctaatgctgtgtcccgatgagatttgggcactcttgggatgttggctagattgacttgcatgtggaataaacatgaataatagtgatgaacaggtgggctgtgattattttggttattgtttaccaaatacccttctcctcttcctaccatgagcagaatttacttccctgtcctattaatagtggacctgttcatgtgccgtgatgtggcaatgggatgttagcaggatggatacaagcggtcattttaaatgtgtttcttcagtctttgtgcttctgcctttagtcatgagaagaggatggctcaggtagtcgctccttatgggaggatgaaaaatctgcatctcagagccgaactaagcctaaatcagacaaatcctagctgacccatgaatgcatggttacaaaaataatgcttattattttgagggtggtttgttatgcagcagcattgtgaatagctaactgatacagggagaaaaatatggtggtggcaccaatggattcagcagtggcaacttcctgacttctgaaccacagccatggtgttgggatctctaaagcattatcactgggaccgtccctgctttggctcttcctacctttccagcgattttgtgagccactaattctctgtattttatcgtttaattaattaattaattatttttgagatggggtcttgctctatcttccaggctggagtgcagtggcatgatctctcggctcactgcaacttccgccttttgggttcgagcgattctcctgcctcagcctccggagtagctgggattacaggcgcatgccaccaagcccagctagttttcgtatttttagtagagatggggtttcaccatgttggccaggctggtctcgaatttctgacctcaggtgatctgcccgcctcggcctcccaaagtgctgggatgacaggcgtgaggcaccgcacccagcctgtattctgtcttttaaaataaagagattttattgtctgcacagactcatcaaaggtcttctttgaccgaatccctctcattttttatagtatagccatatttctcttgttctagtcctcaatatgccacacctgttcctgcattaggaactttgacttgatgttctcactgtccccagataacctttcactggatcttcacatagctggcctaccaatctgaaacagactgtctgtcacttaatattttattgccctaatttttagcatagcatccattcatactaaattccttctttattaattgagagcactcctaagaacacgcgtcttgttttattgtgcaagaaggagatttataataacattaatatctgttaccaatgtgtcttgttcattgtcaaagccttggaaatataatttgaataaaaaggttttggaatactgaaaagtctttagaaatttttgttctgtcctatgttcatagtctttgaagaaaaagttattctgactgtttttcatacttgttcatctgcttcgctggttgtaattgatgtctctgcattcctaaacaagataaatacctggggtttgctctattaaatcggaagataattggcactttcctcgtcttcaacatgtgtaaacggtgagtggaatctaaaatctgctagatttcacaatttaacaagggagtggtgttgaaagtcttacctcattgaggttggcagactgaatgcttgattccagttgtcccatgctaaccttgatattcttttttttttttttttttaacttttaggttcaggatacatgtgcaggtttattatacaggtaaattgtgtgtcacagggctttggcgcacatattatttcatcaccaacataataaacatagtgctttataggtaatttttgtatcatctccctcctcccactctccaccatccagtgggccctggtgtctgttgtccttttcttttctccatgtgttctcaatgctcagctcccacttataagtgacagcatgcagtatttggtattctgttcctgcattagtttgcttataaccttgatatagttacgtgaaccaaatatcttactgtattctttaaggtagttatatagagctggattttaaatagaaattggaaatagaaaattcttcacaatggttacctcggatgtgtggaattagaatattgaagctgaggtggagagagtgtttattttaatatattaaaatagcatagtatttctttttaatgtaatttttaaaaaattaaaaaattcccagttttatttccttcctatatatgcgtgtgtgtgtgtgtgtatacccacacacacatccccacccccacccccacacgtacgtaattgagagca[187 bp omitted]gtggcgggcgcctgtagtcccagcttctcgggaggctgaggcaggagaatggtgtgaacctgggaggcggagcttgcagtgagccgagatcgcgccactgcactccagcctgggtgtcagagcgagactccgtctcaaaataataataataataataataataataataataataataataatgtaggcagtaacatgccagagacagtagtttttacatgattctgtgtttttcataaaagatttggaatattttactcacttctagggaacagtctcctgtcattttattggtaccatctcatcaatcaccagcacgctcaattaattcattttaggacaactcatccatctctgtggtccttccacctccatggggatccatatgtgtgcacacaaacacatacacttttcattcataacgacaataaaaagtacagctcccattttattctgcaaatattttgaggttaagagaaaggggaagctggttgaaattctggttcaacatttgagagttgctggttgctacaacagttggttgttgagagattggacccttcctttcagccagaaaagaaagataatgtttgcctggatattattgggtattacaagagaaataagcaagccaagtacacgcggggagggcgccatcttgttcttgttcccgccactgctctgacgcagcaagaagaagtcaaaatcagttggagcttccaatctactgagcctctacctgcttctcctttcattcactgccatcttttctttgctgtttgttcacttctggctccacgtttatccttatgatctttcttttgcacatactctatccttagcactctgttcttctcccacacccaccaaacacccacttggaaataaacccaaacatcgcccttctcagtgtgatcccatgagcaggtatagctgtggtgaaatctcataatttagtttggtgggattacaaactcatgttccccagccatgctgagtgctatctgcatgcacctcccggctctctctccacccctcattctgctctgagctcctttccctttgctttctacttgggcttgaccaatgggatgcactggcaggagattaaagggaagaaggttgaggtattaattcccttggctcccatggattggtcacttccacagccactttctctctctctctcttttttttttttttttttgagatggagtcttgctctgtcacccaggctggagtgcaatggcacgatctcggctcaatgcaacctccacctcccgggttcaagcgattctcctgcctcagcctcccaagtagctgggattataggtgccggccaccacgcctggctaactgttgtatttttagtagagacagggtttcgccgtgttg[133 bp omitted]cattctctcctattctgtctctcgcttgctctccatctctgtcctttttcttcctcccttgctctcccacgctctcaattccaggaatttctcttcccctcactgtttaggtattgctcttactatccctgaatactgcactattatctatagtttccagtttcctctaactacccaatttgagcgtgcagtaagcttcctgactgacgcattaacctcaaccaaaccccctacactagccagacgtcttccaacatttctctggtcacctcactctccactctcttcaatgaccatgacacacctaccccactatacccatccctctcattgtcacaagattacttttcctactactttcctgataaaatacaattaaaaaaaactctctcacatatgaatcccctcaaatctacaaatctgcttatatccacatgcacttacattttcttatacctcgtaacaatggaagaccagtttctaccgaaggtgactccactccctcctcctgggatcatcccatctcttccttttttctctgggccttctatcagatatttcctctctactattctttgttatttcctttcatgtttttttccttttgagatgaggtcttgctatgttgcccaggctagtctcgaactccagggctcaagcaatccttctgcctctgcctcccaaagtgctgggattacaggcgtcagccaccgctcctggcctctataatcaaattggattgtatccagattctgcttaccgaacgatgctctgtggcttctctttggacttagccagctctcaagtgctggcttgcccactgcctggctcccagggcactcaccatggaccagccccagtggctttccctcactttgtacagcgcacccatctttgttgcccttgttcgtgtggttcatatctgaccctttttaaacctcactctggtactttatctccacacctgtattcctacctcaggtatcacctcagttatcactttttttctgttttagaaatattctttattaaggtaatgcattttttttttttttttttttttttgagacggagtctcgctctgacacccaggctggagtgcagtggtgcgatctcggctcactgcaagctccgcctcccgtgttcacgccattctcctgcctcagcctcctgagtagctgggactacaggcacccgccaccacgcccggct[175 bp omitted]tttaagtcacagaaaaattgagtagtaggtataaaaatttccatgtacacatagccactgtgttatcaatatcctccaccagagtggaacatttgttgcaattgatgaatctacattgacacatcactatcacccaaaatccataagcttattttacttcatttattttattttagaggtgggtctctctttcatcacaactcaatgcaaccttgaactcttgaactcaggtgattctcctgcctcagcttcccgagtagctgagactacaagtgtgtgccaccatgcctagttacatttttaaattttttcttttgtagaaacggggtcttgctatgttggtccaggctggtcttgaactcctggcctcaagcagtccttcctttttggcctcccaaagcgctgggattatgggcataagccaccacgcctaccccatagacttaatttttaaaagggactaattttacacagttagcaattaaagtgctgaggctaaactacagatttccatattaaaaccccataatcctgaatcgaaaacctctagttatttatagttagatcaccttcaactcacatcccagaaaaaaaaaaaaaacaaaaaaaaaccctctctaatgagaaagggttctcctctgccaacaaaaactctaggttctttccaaggagaatgattaaacgtcttcatccccctcccctggtaaatctcaccatcattcacagtatttccaaattcggtccttgttaaaattcttggtcagtgaacaccattttttcccaaatgcttccccatcatcagtacactcccagtagatcaagcgtctgtaccagaagggaaatacacagtttgcaaaatctgcagaggaggaagaggaagaagcagagtaagaaacctttctaatttgcacccacctccaccacaccatgcacacacatgcacacatatgcacacatgtgcatgcacgtgaacaaatgtgcacacatacacatgcacactcacacagacatacatgtatgcacactggtgcgctcacacacacacgcgcaaatacacacttttgcttcctattcagtatcatctgctctgccctatttcaccaaaggcacatgggaacaatattggtgggggattcagatcccacatcactttgctgttctattaaaaagattcttttcaaaataatgtggttgaaatgctcataacatatctatggtgcaatgtgatttttatatcgtcagaaatcgaacatcctttattttcacaacttaattggctatggattctattttcagaaccctcttgtgttttgcctcagatcccagcctcagagaccaagattactgctctgaggtatttagagacaggacactcaccttctgcactgcaaaacttccagtatccttcgtaggtcttgtttaacgagcaccacttgtgtcttgccttggacttgatgcagtcataatatgttccatttttatagtggaatggaaagacacactccccatctagagaaaacaaaattcttcctctgtttctgggtgtgttaggagagaggttatcaagcgactgtcttcctaggcgctgttgccctttgaaatcagagtcattggctgtggctgtagtaaatgttattgtgctactcaatagcagagctttggctctctaatgacaaagctcttttgttttatattcctgcccctgccctacttcttttccaggttataaacagtctcaaaattttgcttagcatttgccccagtttcagaaatctctcctaagcgtagaaatataaatgtgggcatttatctacccaacaattcttcccccctgcccctggatctcttatttttacctctttccgtcatctctctttctctccctctcccatgcaactatacatgtgtgtatgtgtgtcacctgggtatatctgtgttgtatggttttatatatatacttatatatgttatatggttttgtatatatgctgtatggttaatacaggatatatatatatatatatatatatatatagttataggtgcatacacacatacaggcacacatacataattttttgctacccttcaaaatgaatcatattttatacttgagtttccgacttaacacatcacagaaatcttcttaaagtgattgtgtagccctaacttcttcatggttcactgcagccttatcctcctgggctcaagcaatcctcccacctcaacctctggagtagctgggactgcaggtgcgtgctaccatgcccagttaatttttaaattttttgtagagatgagatctcactatgttggccagggtggtctcaaactcctgagctcaagcatcttcctgcctcggcttccaaaaatgctgggattacagtcatgagccactgagtccggccttaacttctttctaatgctgattcatgttctgtgatatggattcaacacaatttattcagtatttccacattcagatttttcctactgtaaatacagctgtagtaaacatttcacatatttaagtccttatgtattgaagcatttgtttctatagaatccccaaagcaaggttgcaaggacacaatgtatatacaattttaacattgatgaatattgctttgtcaaaggaaaatggcaattagtctttcccaccaattgtgctcctttacctgaattttcattagcacgaagcatttacacactttaaaaatgtttacctgtattacagaagatttctgccttgctttaaaagatctactggtctttaggccatacatatattttccattttcttcttaaattaaacaattttgttccttttacatttaaaatttgattaagctagaatttagttttgtatatgatgccaaagggcaatgcaactttattttctttcaaacatatttagtaatgacagatcgatgatgaaataaatcacctgtacatttaaacaatcatgtttaaaaccatggattattctaatatatcctgggatccattctatattttctataaagtttcttgaaattattagagaggtaaggaagcatggtggtaaaatgagcaggctctggagccagcaagcatcacaaaatatttcttcttttcttctctcctcttccttctcctcctccttcttcttcttcctcttcttcttccttcctccctcctcctcctcctcttccatttttctaggctgattccatgttgcttatattacaatattttagtatgtctacatatctgatgagacaaaatatttctctactacagcactttgttcatacttctaattattattggatgtttttctatataaattttaaaatctattatttcctgttagattggcagaaattaaagagtagacacatttagtgctgatgaaagttcagagtgacttctatacctctgttttctttatctgtttatgaggcacttatgttacattttatataaggagaaaaaatgattttttttactggaaaaacattactgatttcctcacttttacaaaattaaaagaaaatatacattaataatcaaagttttctgatcgacttacctgtaacttctggaaaatgagttatagtttctgaaaaataaaatttagagctgacatttatttcactattattaggctttaaaatgggctcttacgtaaaataaaattaaataaaaatgttagtttaggaaaaagtgatattgttatggcattatgttttccatccaagaacatggcatctgctctttttcaaaatgtatttttttgctcttcaatatgattttcttatttattctatataaatcctacacatttctcacaaatttaattccaaagtgcttttttttggtcactgatgttaaacagaatgttttccatttccatcaatgtccagttggttcttatcagtatagagaaaaactattgactgttgtatgtttatcttgcatccagccacatagccatattactttattaaaactaataatttttattcatgttcttagggatttaaggtatacaatcataaaataattttgcctgttattttatatagagtttgtcctttctacaatatcacttatgttagaacctaaaatagtgttaatgtaacacccctgtgctttcctagttttaattggtatgacacttagattaagaatgtttatttcagcatgattagtattagattaaaaataataattaaaaaatattcatccctgagggaattttaaaatgaaattggctttataatatcaagtaggcattaataaagatgagtatataaatagatacggaaaaatttgtacttcatttttaggtggcaaaaggcattttctatttccttcttttccagaatacttgatttttgctaaaaatcacattatgaagttacatgtaatgacatgtttaatcacccaaaagtaaaattaacagtaaaattatgatttatctcctcttcttctttctttttttttttttttttttttgagactgtcacccaggctggagtgcagtggcgtgatctcggctcactgcaagctccgcctcctaggttcacgccattctcttgcctcagcctcgggagtagctgggactacaggcgcccgccacca[138 bp omitted]atttttaacatgaaatttactttatatataagtacataaaatagtaatctttaatgaaaagtatgatttcttaccaggaaagggaatactcaatggtttcacattttattgcaaaaatttgaaaagaaacgctaataaaagttttttgatcaactcacccacagttgatgataattcatctgaaaaacacaattttgaacaaatatttatgtcactttaaaataaaagagatgaaaggatttcaccaatttctattctagtaagaataatactattttgaaagttagacatcaaagttcaatagagcttatttttagtagtgtgattgtgggtgatttcttactttccttttgctttaattgtatttttcaaatattattaaaggataggaatgattaaaattatttttaaaacaaaaaattcagcaggcaaaggaaatgatttacttttctcacatttttctataaaataaaccacttcatcataggtttctgatatgaacactataggtttttatttctgtcaccacttctcactgaatacctgaattctactattagagattcatgtctttggagttgccactttcaaaatggaaacctcttcctctaggagggaaaaataagaatgatacctctgaggtatgtaggaaatgcaaataaatgctctgaacgtcttctctatcctgggcactatattttatttaacttatcagaacaattttgtgaggcaggcattgtttccatcatcttagagataaagttcagaaatgttaggttccattaaattaaaaaagttaagcatatggcaattcaatttgaatccccccggaggggttggttcagtaggaagtaacggcccaaaccctggcacaggctcaaccacttaccaaccatctgccctcagtttactctgctgtaaaatggagagagaacattaggatgtcaagtcctccccagtttgaatatcctaatattcttggaatgaaggaaactgcctgatagctttactttttttttttcttaaagcagcatttttcaaccattgttccttcatgagccattcaacctgtaatatttacctccccctccttagaacttgaattttttgttttgttactttgcatggttcctgatgaagtgattttaggcaaaggctatttgatttaaaaccagcatgttttagttaaatattacataactgttacaaagttcatttaattgaggctttaagaacagtcataactttaggatgaaatacaacatagaatgaattgtagaataaatatagagtgaaaaatttgattttttcccaaatagcccgtaatagatgatgcttaataaccattaagatgatgtcagatagaaaagcacaatttaccaacaagtaaatttacaaatgtcatgtttggttaagagaacatccacgtattataatgtaattagcagatatctctcatattaaagcattataactcgacatattctgtgttcataactagttcatcaaatttgtggattacacttgaaagagcaatgacttaattttttattttttgaaaagatttttgcaaaagcaatgattttaattctgaatttgttgtgtatatttcatttattactgacgattttgctatttgctcgtgtttattcattccacaagtttgtttttcagctaaattgtcctggctgccattgtggcttgaaattaaaacgtttttccttaggcacatcttatttaagaaatagtcataatggaccagcacaatggttcacaagctttgttgcatattagaatcaccagctgagtttttaaaaacccagatcccttccacttctgggtatatatacaaaataattgaaagcagagactcaaacaaatatttgtaaacccatgttcatggtagcattattcataatagccaaaaggtggaaagaacccacatgtccgtgagcaaatgagtaaataaagaaaatatggtagacacatacaatggagtattattcagcattaaaaaggaacaaaatttgaatagatgccaccacatggatgcactttgaaaatactaggttaagtaaaataagccagacacaaaaagacaaatattatatgattctacttatatgaggtaactagaatagtcaaatacatagagacaaaaagcagaatggtggttgttaggagctggagggagggaggaatggggagttattatttaatgggtgcagagtttcagtttgggacaatgaaaaggctctggagatagattgcacaatttgaatgcattgaatgccactgaactgtgcactggttccagtatatagggaagatctcacgatgaagggatctgcatttattcagccagtccatcaacccactcatgtagacaacaaatatggattgaatgcctactatgtgcccagcctagtgctaggttctgggctacccaaaaagggagtggctgaaatggtagactctggactacagaaaccatgagattcaggtgggaatccaagatcaatggactcatcaggagttaagcttgtctttctctgaaatatggggattataattgtttctacttcctggatttgttgggttcattcagtatgcattccatagtgaaactattaggaaatggattttggttttgaggatcatgataggcctgatttcatgaatggggagatacagacgagtgattccaacatagcctgtctgctaagcactatgatcttagaacaggtatcaccaggtaagcatcagaatgcaacatccccatatcataaacacagtgcaccatcctcggtgctataaaattatgagtccccactcaaacgtcccactctgattaacaccagaaattctgccatccacctggtggatcatttgttgtgaatgttgggatgttatgtttcaaaaaataccttgcaagtacaatgcaactgcaaagcaagtggactacaaaatgaagccggtcactttgtgaaagatgcaagaatgtatgaatttaatgacagtgatacaacaaagttaaaaagagcacatattgtaactccataagggctttgaagagaaatttttttttttttgacacggagtctcactctgtcacccaggctggagtgtagtggcacgatctcggctcactgcaacctctgcctcctgggttccagggagtcttctgcctctgcctcccaagtagctgggactacaggtgtgcaccaccacctgtatttttacttggctaattcttgtatttttagtagagacagggttttg[131 bp omitted]atataatataaatatatataatatgtatattatacataaaatataaatatatatattatatatttttaaattcaaaggattaagaagggcccctaaaaattaatatagtcctagaattagtcttagaatacttatacaaaactggctttctttatgaccctttgaggaaagtgtagaatggaagaagacaaagctatgcactggaaaatcgtaacaattttgtcaggaaagtcctgcatcccaattcttttcattctcaagaattcacctttggtcataattcaagctaaattctgttataatatataaggttttaaaaatacccttatttgaaataaaaatgagtctcattttttcagttaaacccaaatcgaaattgttttatgcagccataacaaagaacaaaatcatgtcctttttagcaacatggatgcagctggaggccattagcctaagcaaattagtgcagaaacagaaaaccaaataccacatgttctcacttataagtgggaactaaacattgggtgcacagggacacaaagatgggaacaataggcactggggattacaaaagtggggaggtaaggaggggacccaggcttggaaaccaactattgatggccgggtgcagtggctcatgcctgtaatcccagcactttgggaagctgaggtggactgatcatgaggtcaggagttcaagaccagcctggccaacatgatgaaatcccgtctctactaaaaattagccggacatggtggtgggcgcctgtaatcccagctactcaggaggctgaggcaggagaatcgcttgaacctgggaggcagaggttgcagtgagccaagatcgcaccactgcactccagtctgggcaatacaagactctgtctgaaaaaaaaaaaaaaagaaagaaaaagaaaaagaaaactgcctactgggcactatgttcattatttgggtaatggcttcaattgaatcccaaacctcaccatttatgcaacatactcatgtaacaaatctgcacatgtacctcctgcatctaaaataaaattttttaaaagaaaaatcttttgaaagaagccagagggggaaaaataccttacctacagagaagcaaagataagaattatgtccaacttctttccagaaaccatgaagataagaatgaagcatttacagtgttgagagaaaaaaaagtcttcaatctagaattctgtaccctgcaaaattattcttcagaagtgaaggagaaagaaagacaaagattctcagacaaacaaacattgagggaatttgctaccagaaaacctgccttgaaagaaatgttaaaagttcttcagagatataaagagaggaagcacattagaaaaagagtaagtaggcccggcatggtggctcacacctgtaatcccagcactatgggaggccgaggcgggcagatcacctgaggtcaggagttcgagaccagcctggccaacatggtgaaaccctgtctctactaaaaatacaaaaattagctgggcatggtggtgtgcgcctataatcccagctactgaggcagctgaggcaggagaatcacttgaacctgggacgtggaggttgcagtgagctgagatcacaccactacactccagcctgagtgacagggcaagactttgtctagaaaaaaaaaaaaggaaaagaataagtgaatgtaaataaaatgaaagcatgtgaaatgtgttcaggagcttatgaagtcccctgaacccgatcacttttccagaggatgagcagtgaatttcagcatcgtcaacagcatatattggcattcttgcagttgcccgcaggaggatatagtttatcagactttattcttccaagctacggagccccagaggagggaggagtctggggaagctggtcgaacagactagggaaaaaaagctgcagtggcctccctatcgtggggaattgctgtagcctgctacatggtagtcctacgatcctaacttggccaagattcttgtttgggttcaagagctgggtcaggagtcttcccaaagtgctgcacttgctgttccattctatgttcaatggaatacagcacaagatagaagacaaaacttacgaatctagagaatgtcagaaggcctggaagagcactggtgaagagcaataacaatgaatggggaggagttggggtccttgggtaccaaaccatgggaggctcatcccccagacaggagagccgcgtggcctctgtgattgcttcttccttggttttgtgctgtagaattttactggtcaggcatggtgatttacgcttgtaatcccagcacttttggaggctgagccaggaggactgcttgaacccaggagttcgagaccagcctgggcaacatagcaagaccccatctctgcaataaataaagacacaaaaattagctgggcatggtggcgtgcacctgtagtcccagctacttgggaggctgaggcaagaggatcacttgagcctgggaggtcaagactgcagtgagccgtgattgtgccactgcactccagcctgggtgacagaatgagaccctatctaaaaataaaataaaataaaataaaaataaaaaaaatctagacaaagtaccatagactgtttggtctagagcaatagacatttattgtctcacagatctggaggccagaaggccaaaatgccagggttggttccttcttaggagctcagaggcagaaactattccatgcctctctccttgcttttggtggctgctggcaagctgtggcattctgtgacttgtggcagcatcactttaatcttttcttgtgactatgcgtgcttgtcttccctgtgtgtgtctgtttcctcttcttataaagataccagtcattggattagggccaacccgtatccattgtgactacatcttaattaccgacatctgcaaggacctatttcaaatacagtcatattcacagatctctggtaaacatgaattctggaaggacactatgcaatgcaaccccagacagtgaggatgaagacgaagaatttgagtgtcactagacaatccagtttgtggaggctaaaacacctctgtcttgggtgctaattcgccgtgttggtttctgattaaccccgtcctcggaatgtccctacaatttctattttatctactgttctttgtgtaagaacacgtactacatgtacttagtacttactttttttttttttttttggagacagaatctcactctgtcacccaggttggagtacagtggcgctgtcatagctcactgcaggcttgacttcccaggctcaagtgattctcttgcctcagcctcccaagtagctggaactacaggcacacactaccatagctggctaattttcaaaagttgctgtagagactaggtcccactatgtttcccaggctggtctcgaattcctgggctcaagcaatcctcccaccttgaactatgcatggccagagcttgtctttactattgatcctgcccttaggtcaaaacaaccttgatcaaagaacctttaggcagggctgggtgtggtggctcacagcactttggaaggcggaggtgggcagatcgcttgagctcaggagtttgagacctgcctgggcaacttggcgaaatcttatctctaccaaaattacaaaaaaattagctgggcatggtggtgtgctcctgtggttcccgtactgggaggctgagttggaggattaattacttcagtcccgggaggcggaggttgcagtgtgctgagatcacaccactgcactccagcctgggtgacagagtgagcccttgtctcaaaaacaaataaaataaaataaaaataaaaattacaaaatcagaaaaattttaaaaattaaaaaaagagaaaatcctgccgttttcagtaacatggatgaacctggaggacattatgctaagtgaaccaaaccattcacagaaggacaaatattgcacgattccacttgtatgagaagtttaaagtagttaaactcactctgtgagtatcgactactaaatccaaacccttatcctgcctctttaatactgtaatagtacttttggtactataatagtagtaataatgacttaatgataacagttctgttctgagcgtcacgcatgctaacccatttaatcttccagcaaccctgggagtcagcaagaatcacgatcctcctgtttcagatgtgggaactcacagacatccaggactcaaagtcttgcttgaggccacaggctaagcttggttggaacccggagatgctggagggaaaactggtctcctgagcttgccaggagcagagttgagtgggacagaggaggcgagaggagccttcagttcttggtgagtgggggtgcatgagagctcttagccatggttcctcctcatcctctttaaataataatggctcttgcaatgcaagattcacattttagcacaaacgtttgttgacatcaaacgatcggttggtgggcagtcctaccgcaccaaagcctgaactggcaaaagtgaaaaccccagagttctgggtgcacgaagcatgtccgggtctacacacctggacagttctccccgcaagggaccccactcccatgtaatcccttaggcaacccatcaagttggaatagtaattacatgttggacatggcaaattcctagccctggaacaagatcactcaatcaagtcctttgtgaagtcttgccaattcaattattttttctttttcaggctaggcgtatagctgatttagcatgtgccatacacatggtctgtttcctcttctgtcttcccactagatcgtgcactagtgggaagaggtgggggtgcatatcacatgctcatgagtggagatgctcatgctatttagtctctgcatctgtgcatccagcaaacctatcaagtcaccgttttattattattattattattattattattattattattattattattattttgagatggagtcttgctcttgttgcccaggctggagtgcaatggcatgatctcaggtcactgcaacctccgcctcttgggttcaagtgattctcctgcctcagc[207 bp omitted]gtgctcctctgatgaggatgaggaggaaccatagctgagagctctcatacatccccactcatcaagaactgggactcccttcacctcctctgtcccacttgactgctcctggcaagctcaggagtccagatttccctccagcatctctgggttccaacgaagcttagcctatggcctccagcaagactttgagccctagatgtctatgagttcccaccttccgcttatttgtgacgacatcttattatctgcaagccggattgctgtggggacccagctgttattgtctgtattgaattcgaccagcatcaaaaacttgcagtttgctactcagtagctcaaaagaaactcttaagagacaataggctgtgtgcggtggctcctgcctataatcccagcactttgggaggctgaggtgggtgaatcaccgaagatcaggagttcgagaccagcctggccaacatggtggaacctggtctctactaaaaatacaaaaattagctgggcatggtggcacgtgcctttagtcccagctactcgggaggctgaggcaggagaattgctcgaatctgggaggctgaggttgcggtgagccgagatcatgccacagcactccagtctgggtgacagagcaagactccatctcaaaaaaaaaaaaaaaaaaaaaaagagacaataagtccaggaggcagatgcttgcaagggagagagagggagatagtgaataggcaacagttctgcagatcaaaagtagactagcaccacatcatttaaaatacaggctaacgagcccggggcccatgagtttttattctctgatgcattattaaaagaaatgcttcatcagtaaggctctgaatagcacaagtattatgtggaaaaatatgacatccataaattaggagaccagacattgacagcggagaagctttaggatcgtcttaatttgcctttttccacttatctatattcctttttatgtatctacaaacatgatgtctgatttaaaaaaaaaacctgtggccaagtacagtgttatttttcagtaagtataaaataattctagtggataagaaagcagtggtcatagttacattgggagtatattttcttttctgttctttaaaaaaaaatagcaagcagtgttatttttttttaatgcaaagatgtcctgaagaatacttaaaagaaatatctgcaagatcattcttcttggtcattccataaaaaattgtttttgaaactatgcttagtcctcatcaaacgttgtcagatgcatccatagtgaattcccttcttatttttctatttcgcttcataattgttacaggcaacacgactttggaaaaggaataaaatcgactttatgaaaattagtctcattttcaaaacctctgcaggaggcatttaaaatctcctagcatgaagggaggagacacatggttttcaagtaacatgtcactaggattttccaatttacattcttagtctttcattattttattagccgaactttcttattttttaaaaaatctttacctatggattgtgtttctgacatggaagggagagtatctttttctttcttaaggtacctaaagcaagggagactgttgccctccatggcgactgggatttgattacatacagcagccgatgtgcaggactccgtcccagccagggtcacctgtctcctcaccttcttccagaacgttaaatacagcgccgaccacaccaccgaccacaccgcgaatcaggcagacccaaaccagcaggagccccatgtgccgggccatgctcctgtcagacactcgtggtcgaccagctgatgtccaagattttatagcccctggaactaaccacaaccacttcccctccctgtccctcctctctttccctcctccccacttcttccttgtccctctcctttttcaccttctcctcctcctcattctttttctcccttctccttctcctctcctcctcctccttcctttcctcctccttcttcttctcttccttctcctcctcctccccctccttttcctcccctcctccttttcttctttcttcccctcctcccggtcatcctcctcctccctctctttcccctctgtctccccctcctcctcctccccctcttcctcctcttccctcctcctcctccttcccctcctcctccgtctgctcctcctccccctcctcctcttccttctctttctcccctcctcctctcctcctccttcttcctactctccctcattcccctccttctctccctcctcctcttccttcttcacctcctccccccttctcccccctttccctctttctcccctcctcctccttcctctcttcctcctcttccctcttccacctccttccctgcctcttctccttcctcctccttcccctcttccccttcctcctcttctttcatctttcatccccaccttctccctccttccttgctctcactctgctccaaagttaagctatctaccttgcataggaagaaatatagaaaaagaaatacttaaaataacagggaagatgcaagctgaggaatttcgcgtcgtttccacgaagagaagcatcagggagcccatgggcagtcacaggcttcccggtatctcagatcttcctggtctttgtcagccagggctcaagaatcccctggagaggcccagggaggcttcttggaaaagcaggtttgcttccctaatataagcacctttgttgatgctccacaaaccttcagtgtgggccactgttctctggaggcccttggtgattaacctaatgggctgcagatggctttgaagttctgaggaacaagtggtgcagccttatggacacctacatttccaactatgaaataaataaataaataaataaaagtatttaaaaaagaaaaatcagattaatcctgaattctgaaacccaacgtgttcttagttactgttccttttttttttgagacagaattttgctcttgttgcctaggctgtagtgcaatggtgcaatcttggctcactgcaacctccgactcataggttcgagcgattctcctgcctcaccctcccgagtaaatgggattacagaagcctgccactacatctggctaatttttgtatttttagtagagacagag[138 bp omitted]tcacgtctgcaatcccagtgctttgggaggttaaggtagggggatcgtttgcaaccaggagtttgagaccagcctgggaaacataatgagaccccccatctctacaaaaaaaaaattgacgaattagccgagcatggtggcatgtgcctgttgtcccagcactttgggaggttgaggtaggaggatcgtttgcaaccaggagtttgagaccagcctgggaaacataatgagaccccccatctctacaaaaaaaaaattgacgaattagccgagcatggtggcatgtgcctgttgtcccagcactttgggaggttgaggtaggaggatcgtttgagcccaggagtttgaggctgccaggagctatcatcgcaccactgcactctagcctgggcaacagagtgagaccctgtctcagaaaaaaattgtggaaaacgggctatcttttcatctccatttttttttctcagtaagatggaatctcctttggaaaaaagtgtcaaaagaaagccctccccccaactaaactgtcaaaaatgtcagcaactatcaaattagaaactcttatgaaataaaagcctatccaagactttaaaaatacctttgaggaatcctagtttttggaaatgactgttgccttcacttatttctaacatttcttttttcttttctttttttttctttcttttcttttttttttttttttacatggagtctcactctgtttcccaggctggagtgcggtagcgtgatcttggctcactgaaacctccacctcctgagttcaagcgattctcctgcctcagcctcccaagcagctgggaccagaggcgtgtgccagcagacccagctaatttttgtatttttacaaaaatacaaaaattttatttttggggtgtgctggggtgtgccagcagaccccagcagagatggggtttc[133 bp omitted]cagatcttgattatattctacaacataatgggtggtctctggcacactgcctttttgctattattattgatactttatgaagaccaagtgtgctaagacattgtacatttgcggagccacccattctcccctttaacatctttgtttcatgtcactcttcactgcattgcatgtcatcagtttcccattctgcaagtatttcttcaatcagtttccctttattattagccatacgagatccaaaaatcccttagcaggttaatgtggactgggtgcagtggctcatgcctgtaatcccagcactttaggaggccaaggtgggtagatcacctgaggccaggaatttgacactagcctggccaacctggtgaaaccctgtctctcctaaaaaatacaaaaattagctgggtgtggtggcatgtgtctgtggtcccagctacttgggaggctgaggcaggagaaaggcttgaacccgggaggtggaggttgtggtaagccaagatcataccattgcactccagcctgggcaacagagcaaaattctatctaaaaaaaaaaagaaagaaagaaaagaaaagaaaatagtagggctttttcattgttcagctgaaacctctccagctcctcatagctgaatttctgggaacgttccctcctctgttcattgatattcttgtccctgaccccagcccccgcaaggccccttctgtgtacacttgactgaattttatgggcctcgtggatatgcatgggcttatctccagacatcataaattaaccacagctgatctcatccagactgccttctgacagtaaccactgatgaagaaccctcctttgagaagctgcctttgtgtcctacagacaggctggggccaaagccattcaaccaatccccagataatccagagctcttgggagcagaaccttaaagagagatcgtggagagagccagggcccagaagaactctctcaaaggtacattttgacccggaaacttgggagggtgtgacaagtggggtcttagggcccccatagcaaagaaggaaggtctagagcatcatggtgcactagaaatataatacgagccacataaatcattgtaagttttatagcagaagcactttaaaaaactaagaagagtgcaatttattttaataacatgttctgtggaatccatgtatatctaaacgattatcatttcaacacataatgaatacaaataattattaatgagatactttacattttttccctatactttgtcttcagaatcaataggtatcttacacttacaacatagaacaatttgaactttcccatttcaagtgctcaagaaccagaagtagctggtggctgccatattggttctggaaggggacagccagagaaagtagggaaggtggtcttgtgggtgaggtcctttctctgttaataaactcaaagaaatgggttaaaccagattctatgaatgatgtaatgctaaggaaggttgcctgaatcccaagcttagggaagaaactgaagaaaagggaacaagttacctgttaagagactgggtgaattacttattaaattcttggtagtggattaaaatcttcatggttctgtcaatgtttggaccatttctccaaggtaaggcttactctccctattttaggaaaaagaaagttgagattcaaaaagagcttactgagatcctgttgcttctccctccaaaggcagcctaaatatgtaatagaagaggtgtgtgtgtgcgcctagaggtggagggaaggcttacactgaagttttgtttcagatctggggtcatttgctgctgagaagcagaaggactcattattttgaaggtacactatacttcagtgactttacagccccatgtgtgcctgtaattattcacaatggcttctatagtttaggttttatctccactaaacagataggaatactgacttggagttcagagaggtgaaatgaccttcccaaggccacccagttgaaacatgggagaggtaggatttgaaccctggttggttgggtgctattatcttctcaccgctccactgtgaaattattttggcttaagagaacgagagggcagaggctgtgggctaagctgcctcttgggcaccctatcagggccttaatactaccagttgtatctgccattattttccatgttgggtggtagatattggtgccaatgtcttatctatagctgtttgaagacagctatcatatctggttcctcttggtacccaccacatttccttatagatgatagggttcttgaatactcattggatgggtggtggattgaaggaagattaaagaatgaaaggaaggatgggtggatagaagaatggatgaacagtgaaagaatggatggatggaaggatggatgagaagtggatgaataaactgaaggatggatgaaacgatttatctctgattgttgaaggcagaaatcatgtatggttcctcttggtacttgacacagtttcttatggatggtgggtttcttaaatacttatttgatgaatgattgatggatggatgataagaggatggattcaatgaataatggatgaatagaaggataaatgaatggacagatgagtggatagatagatggctggtgaaagatgggcaaaaggatgggagaattgatagacagatggaagaatgggtggaaggatgaatgggtggatgaattgatggatggatgtatggatgatggaagaagatagatgaaaagatggatagatggaggaatggatgtaagaatgggtggaaggatacatgggtggatgggtggatggatggatgatgaaagaagagttggtaaagggatggttgatggatggatggatgagggaatattaacaatgaagagtatcattaagcagagaaaaaatttctcagaaggtaatattttcaggaaagtttgaaagccaataaataacaaaagtaaaagaagagaattagaacattctcaaaatgtttgcttaattaattaattactgccggtctagcatggtgaatgaatgttatcatcatcatcatcgtcatcattaatggccaacatttattgtgagttatctctatagcacgcattgtcttaagcattttgtatctttcatctaattcaatcctcccaacaactctatgaagtagaactgtttattagcatccccattttatagaggggtaagctgtgaagtaccttattaaatgtcactctgctaggcaccactgaaacatccacacaggtttttaattactggcatgccagtggaattggaatgccaacaccaagaggccccggcacagcgctttgctctatagatgttcaataaatttggtaagtcaataactacctcataaaattaatccattcctaagacagccatctcattgttgcagatttttcattttgtgattttaaactgcctcctattgctttactcagggtgttctatcttttttaaaaaccattttaactctgcatgttttcatgtgagcatatgtgcatgcatatacctgtatatgtgcacatatgatgtgtgtatattacacatgcctgtatacatatatacacatctataatgtatacaggcatgtgcacgtatatgtatatacacattatgtatgtgcatatacatgtataattactgtttctaaaatgttttattgatacacaacaattgtatatatttattgaggtacgcgtgattttttttcttttccttatttatttatttaatagacatggtgtcccactctgttgtccaggctggtctcaaattcctggtctcaagtgatcctcccacctcagcctcccaaagtgctgggattacaggtgtgagccactgatgtgatattttgatacatgcagacagtaatgatcaaatcagggtatttaggatatccattactttcaacatttatcatttctttgtgttgggaatattgcaactcttctcttctaggtatatacataattaaattgtttttaaagacataagtcacacatctgtgataaaaacttaattggaaagaagtctcctatttacccctggttcccacttccagaggtgattgatatcagtggcttctcacatgcccgctcaggaaaacactctgtacatgtatgtgcatggggaacacagatgcagtgtcttgctgagaactacaaggctctgacctaggtttgctagtgtcaccatcttttcgttcctctgcacttactccaaaattggtagtcagcagcttccagtaaaatctcaaggatggcctgggcgcggtagctcaatcctgtaatcccagcacttaggggggc[134 bp omitted]gaggcaggagaatcgcttgaaccgggggacagaggttgcagtgagcttagatcgtgccactacactctagcctgagtgacagagtgagactccatctcaaaaaaaagaaaaaaaatcaatcaatcaatcaatcaatctcagggattgggc[187 bp omitted]ggtggtgggcgcctgtagtcccagctacgcgggaggctgaggcaggagaatggcgtggacccgggaggcggagcttgcagtgagccgagatcgcgccactgcattccagcctgggtgacagagccagactccgtctcaaaaaaaaaaaaaaaaaaaatgcagagtccaaccttttgggggacatttcactggaaagggaagaaagtctcagacgagcttgtgtacaagtccagtaaacacaccgcgcatgctcacttcccaagcctaaaggaggcactgcgcatgcgggaggcccaccctaaggggaaaaatgaagggtccagccatgtggccctcccttctgtgcgtcagaacatgtcacattgtttcccacatcagcagctttgccctcactgatccctgtgcctggaatgcttgttcctcacactgtgtgtggctgactctaggttttggttcaaacatcacctgctcagagaggccttccctgaccaccaaaggagacatctgtcaggcatgattgtttacattcccctgtttattattttttttcattgcacttttcatattctgaaatgattttggttttggttactgtggtagaatacacataagattatgattttaactattttaaagtgcacaatttagtggcgacaagcacattcacaatgttgcaccatcatcaccattatctatttccaggaacttgtcaccaccccatactgaaagcctcatttctttttttttttttttttttgagaaagagtctcgctctgccacccaggctggaatgcagtggtgtgatctcggctcacagcaacctccacttcctggcttcaaacaattctggtgccttagcctatggaatagttgggattacaggcatgtgtcaccacgcctggctaatttttgtatttttagtagagatggggttca[142 bp omitted]atattagcctcatgcaagaaggaatttcacctgtccagtctaccgacaactccacatagtaggaggaacacaacaaatatttatcacatacgtgattttttttttttttttaggaaatggggtctcgctctgtcattcaggctggagtgcagtggtgcaatcatagctcactgcagcctcaatatcctgggctcaagtgatccttccccctcagcctcctgagtagctgggactacaggtgtgcaccatcttgctcaactaatttttaatattttgtagagaaggagggggtctcactacgttgcacaagctggtcttgaactcctgaacacaagtgatcctcccaccttggcctcccaaagtgctgggattacaggcctgagcccgcacgcccagcctatgtttaccatgattatttgttgagcactcagcatgtgccaagaactctgcttacattgtatcatttcattcttcccccaccccggccgccccccaaaaatcctgccccctcccccatcccccatagatggagtctcactctgcccaggctgtaatgcagtgagccaagactggcacgatcttggctcagtgcaacctctgcctcctgggttcaagcaattctcctgcctcagtctcctgagtagctgggattacaagtgcgtgccaccacgcccagctaatttttgtatttttagtagagacgtggtttcactatgttggtcaagctggtctctaactcatgaccttgtgattcgccctcctcggcctcccaaagtgccgggattacattcatttcattattaaacagtcctacgggatagatttcagttgtctcatatatagaaaagaaagctgagagtcaaatacattccataacactctgaaggtcacacggatgagcagaaattcgtatacaggctacccttttccgaagccacaaccacttacgtatttctccattgtggagatgaggactccgagctgtgcgtgtgtccatggagccacacagctggcttgagagggagcctaaggttagacacctttgctccgtacctgttccaggatggctgattcaaatgggacagagataatgaaaatgataacgattaatatttacaaagcacgttttatgtggcaggcagggttttcagccccctgtgtgtgcattagttttctgcagtggctgtaacaaatccccacacacctaaccgacttgacacacatttgttctcttacagttctgtgagtcagtctcactggggctaagatcagggtaccagccaggctgcattccttctggaggctgtagggaagaatccgcttcctggcttcttccagcttctaaaggtcgcctgcattctttggctcgtggcctcttcctggcataactctaacctctgctttctgttgtcacacctggttttctgactctcctgcctctctctctgttttttttttttttgacacagagtctcgctctgttgacaggctggagtgtggtggtgcaatcttggctcactgcaacctctaactccctggttcaagagattctcctgcctcagcctcctgagtagctgggattacagctgagtagctgggattacaccacacccagctaattttttttttttttgtagtagagacgtggtttcaccatgttggccagcatggtctcaatctcctgacctcatgatccttgtgatccacccgcctcggcatcccaccacctctcttttataagggcccttgtgatgacattgggtccatctggggaatcccggatcatcttcccatctcaagatccttagctttatgacatctgcaaagtcttccacactcctttttttgagacagggtctggctctgtcacccaggctggatcatagctcactgcagcctcaaaaccctgggtgcaagtgatcctcctgcctcagcctcttgagtagacaggactacaggcatgtgccaccatgctagttttctttctttttttttttaagattgtttgtagataggggtctcactgtgttacctaggctgatctcgacctcctgggctcaaccagtcctcccacctcagcctctcgaatagctaggactgcaggcatgtgccaccatgctggctgtttttttttaattttaagattttttgtagatacgaggtctcactatgttgcccaggctgatctcaaactcctgggcttgagtgatcctcctgcgtcagcttcctgaagtgctgggatgacaattatgagttaccatgactggcccgcaaaatccactgtgccatgcaacctagcatattcgtggactctaggaattaggacgtggacagatttgtgttgggtgggtattattctacccaccaagcgtctatgaacgacactaacattctgtagcagcaacagtgatcaccatcccttccactgtgcggatgaggactgagacccaggaaactcagtactttgttggggtcacaaaggtagtaagaggcaaagcatggaaacccaggtggttgggctccagggcaggctctttctggcattataaccttctgcctgtctggatcttagcatctaagccaaaaattattcatttgaatcttgaggagaagggtcaaaatgaaagcttgaggttaatgaaccaattaaggtgtaggaattggggttttgggccaggcaggaatataagcatgacactgcaggtagtcaagggtttagaggaggtggcaaaatttgtctctcccccatctccataaatagtaattaaaacatctcgcttgggccgggcgcagtggctcatgcctgtaatcccagcactttgggaggcccaggtaagcagatcacttggggtcaggagttcaaaaccaacctggccaacacggtgaaaccgtgtctctactaaaaagacaaaaaaatagctgagcgtgatggctcgtgcctgtaatcccagtgactcaggaggccgaggcaagagaattgcttgaaccggggaggcggaggttgcagtgagctaagatcgtgccactgcactccagcttggggtgcagagcaagacttcatctcaaaaacaaacaaaaattctggcttgtatgctgtcttcataaatagtaatgaaaatatctggcttgtatgccccctctgacatttacacagtgctttccagcatctgctgcatgtataagatcccaaggtggagtttattctccctcatttgatgattggaaaaactatccccatattttcctgtggtttgactccatagccacagcaaccctttttccgaccagccaagaaacagcagcggtggcaggatgctggtcccaaccaccccggggctcaggacagagggttctccaagcatctgaacctgccagtgcccaaagcataacttggtcctcacctggatgttccagacgagacatgggtgtctggctattagggcttgttttacagttgaataattattttgaatggcccctaaaatattttctatgaatatccataacttggtctgtgcagagtcataaaccttccagaccatcagttgctaccaattcttcgaatttgcacagaactctttattgcacaaagaagcaagccatgcaaatagctggggtcaagggatcatcccaggcaaagagaagagcgagtgcaaaggccttgaggtggcttctgcaggaaacaactaaaaggcagatcgagggaggggaaggaagataagaaatgagtttgagggaaggcacagtatggactagggattgtattctaaaggtgatggaggattttgaatgaataaatgccacccctgctctttttttttttttttttgatggagtcttgctctgtcacccaggctggagtgcagtggcacgatctcggctcactgcaacctccgcctcctgggttcaagtgattctccttcctcagcctcctgagtagctgggactacaggcacctgctaccacgcccagctaattttttttttttttgtatttttagtagagatggagtttcaccatgttggccaggctggtctcgaacacctgacctcagacgatctgcccacctcatcctcccaaagtgctggaattataggcatgagctaccgtgtccggcccactcctcctcactttaacccctcccgtggcttctggttgcttctattctattctattctattctattctattctattctattctattctattctattctattctattctattcttttgagacagtcttcctctgttgcccaggctggagtgcagtggtatgatctcggctcacagcaacctctgcctcctgggttcaagcgattttcctggctcagcctcccgagtagctggaattacaggcacgcaccatcatgtggagggaatttttgtacttttagtagagatgaggttttaccatgttgaccaggctggtcatgaactcctgacctcagatgatctgcccgcctcggcctcccaaggtgctgggattacaggcatgagccaccacacctggccttctggttgcatttagaatctgagggaggctctacagggtccggtcccatccatctcaccatgcatctctgtggccttgctcctcctcacttgttgtagagacgaggtgtcactgtgtggcccaggctggtctcaaactcctaagcttaagccatcctcctgctcagcctcccaaaacactgggattataggcatgagccactgtgcccagcctgggccttagccatgcgggtcccacttgctccttgagcacatctagctttttccatctcaggcagtttccacgtcggcttctcctgcctggatgtatcccccacccccatacctccagctcctctcacgtctccctcctccatctgttcctccaggtgtcagcttacctgtcatttctcagagcaccctcccctcacctctcaatcaaaagtgaccttgtcctagttgttcctgagactcgtccacagcaatgatcacagcgaagagttgtatttgtttctggtttcttcgcttcatatctgtctccttggttgactctcagccccacgaaggcagggcctatgcctgctttacccactgctgcatactcatcgtgtagccctggccccacatcttttaaatgctcaataaatactcattcctgagtggatgcataaagcatgcatcaggaaagggcccatactgggcacagtggctcttgcctgtaatcccagtgcttaggaggctacgcaggaggatggcttgggctcaggagtttgagaccagcctgggcaacatagcaagacctcgtctctacaaacaataataatagtttaaaaattagctgggtgtggtgatgcgtgcctgtagtcccagccacttgggaggctgaggtgggaggatcacttgatgggagatggaggctgtagtgagccatgatggcgccactgcactgcagcctgggtgacagagcaagaccctgtctcaaaaaaaaaaagaaaagaaaaaagaaaaaaacaaaaagagaaaaagagctcagccttgtagaggagagaggctggaggctgcatatcagtgaggcaacaggacaacagttgaatagttgagaagagaaatgaaaaaggccttcctttagtctttaacagcagaggcaggaaaagcggatagattcaggagctccagaaagtagaaccaactgactgatagaacacagcaagagacagggacagcagatctacactgggggctacaactcaggtggttgagaagaacatagtgcaattaaatgaagtaacatgggggaaggatagcatattttgggctgtatctcaacagccaaagcttggaatttgagatgcttgaaggacatctaggtggacatgtctgggaggcagttgaaaatacagttctggctctcagaagtgaaacaatactatatgaacaatactattttggatgatatttatgagttcttagcacatgtccggtcccatgttaagcctagaggcagcatcgtacattggttaagagctcaattactctgaactgagtcagattgttggagttcacttgcaagttctccaacttgcatgatctgtaaccctcagcaaggtgcttaagcttactgtgccccatctgtgcatatctggggtagtaatggtacctaccacgttgggctacttcctatcaggattacagtgaatttagaatagtgtgtagcactcaatgagttttatctgttttttgttttgttttgtgttttgagacagagccttgctgtgtcgcccaggctggagtgcagtggtgcgatcatagtgcactgcagcctcgacctcctgggctccagtgatcctcccacctcagcttcctgagtagctgggactacaggcatgcaccaccatgcaaggctattttttttatttttgtagagatgaggtctcactatgttgtccaggctgatctcaaactcctggcctcaagcaatcctcccatcttggcctcccaaatctgtcatatttttatgattgtcgttaatcatcataacaaggctgagtggtagataggattagcatcctcatgttttgacacgacgaaactgaggcttagaaaatttaaggttgggcccagtggctcacgcctgtaacactagcactttaagaggccgaggcgggtggatcatttgaggtcaggagttcaagaccagcctggccaacgtggtgaaaccctgtctctactaaaaatacagaaattagccaggcgtggtggcacgtgcctgtaatcccagctacttgggaggctgaggcaggagaatcgcttgagcctggcagatggaggttgccgtgagctga[132 bp omitted]aaacggtggagctgggatttgaatctgactcattcatcctgcattgtcaggtctaagtcctgactgagccactagccaaagagaatgagagtccttcacaagtagtgaatgagacatcactcagaaaaagcctgtttgaggcatggtgctggggttaagagtaaaaggcttcaaggaagaacgacaagaaaaagggagaaagacactttgatgtgtagcgggagagccaagcactgttgggagaggaaaaaagtttggggcgtgttgtgtggctcagatactcagtggtgccacctacctgtgggaggacttaaatcagtaactttgggattttgattcctggcggtatctgggtttcttgctaaaagttggttccatctgatgccttcccgagctatcctgaccttggctttaataattcataaatgccactaacgatctacaagtgaaaagcattttcacatcaaggtctaattggaccctcgtggccacccggagacacaggaacgactaaatacattctgcagatgaggaaacaaaggctcatagaggggaaggggtttacgttgcctaagaactctgacactagtatagacaggcccgcactgactctgagatacatcacgtaccagctgtggtcctttggtaagttacttaacctcccaagcctcagtttcccttttctgtgaagtggagatgatcatgcctgcccttagattttcaggagcaaattggattgtggatacaaagcttaggacatccggtatacagtaagcagtcaataattgggagccagccgtagaagtggtgatagtagctgagactcaagtcaaatccagaccaccaattccaaactgtgggttcttgttgctgctgagaatggcatggtcatctgtcatcaaggaaacggcacgaaggaaaatagagctagtaataactatggttaatgaggacggtaaatgctaatcactgaaggactttcgtctccagctaaggagatgagtgtgattcatggggaggatttaaggctattgttaaggttccaacaatgagaagggcccttgcagccattaatatgggttagaacccagaccctgccctttcctccctgggtgaccaatccaggtctgagtgttagtttctgcatctataaaatgggggttaaaacatgtattacttgatttatgaaagccaagtgacataaagtgtgttgaacatcgagcctggagtacagtaagtgttcaacaagtgtttcatttttttctttccatcacactttcctaaggacagtacatgacagtagagttatgcatcaggaatacagtctgagaagtgcattgttaggcaatgtcgtccttgtgtgagcatcatagagtgtactcacacgaacctagatggtagtgcctgctacacacctgggctatatgatacagcctgtgcttccaggctacaaacctgtacatacacacatgtagaaacacacacacatatcacacacacatatgtagaaacatatgtgtgtgtgtggtatatgtgtgtgtatgtgtgtatttagagatagggtctcactctgttactgaggctatagtacagtggcacaatcatagctcactgcagccttgacctcctgggctcaagtgatcctcttgcctcagcctcctgaatagctgggaccacaggcatacaccaccatgcctggctaatttaaatgaaaattttgtagaggtggggtctcactatgttgtccaggctggtcttgaacttctggctttaagcgatcctttgtcttggtctcccaaaatgctgggattacaggtgtgagctaccatgcctggtctattttttaaattactgtggatggaaagaaaaatggcatgtatgacgtcaaatctaggaggtaatgggaagaggaaggggacgtgtgggatgaaaatttttgtcttcttttccacagagaagagggcagccaagatgacccgatggtccagttacctgttgggatggacaaccttccttctctattcctatgagtcaagtggaggtaaggacactcaaagcaacagggaggatttagaagctggagaagaatgaatggggcaaagcaaagattcctggaactaagtaggcaggagatggcttagcaaaaatctcagaagaagctgggcgcggtggctgacacctgtaatcccagcactttgcagggctgaggcaggcagatcacttgaggtcaggagttccagagcagcctgcccaacatggtgaaaccccatctctactaaaaatacaaaaattagccaggcatggtggtgagcgcctgtaatcccagctacttgggaggctgaggcaggagaatcgcttgaacccaggaggtggaggttgcagtgagccgagatcgtaccactgaactccagactgggagacaagagcaaaactccctctcaaaaaaaaaaaaaaaaaatctcagaagacctggggtttggaccctggatctgccacttcttttcttggtaactttggtcaagcaacataagctctctgaagtcaatttccagactgtaaaagagaagtaacggcatttatctcacggggttattttgaagatcaaataaaataatgggcaccagcatctttcataatgctcagcacatggtgggggtaaaaggcaggctatataattccagtgaacagaaccttcagaccccaacctggacaacctaattatatcttaatatatctcagaatctaaattaaccactaaaagactgtaaggtaagcatggaaacagaacaagaggaaaccttgcttacatgtcattcactcaagccttggtgagtcattcttcacaattagaatccttttctgcctgataaatcgttctcctctggataaggctcaggaaccatttgcatattgatgcaccttgatcccacattctttattccagagattcctaacctggggtcattgagtgaggattagagtccatgaaaactggaatttacgttttaaaaaaagtgtgtatttatgagggtagtgagaatagctattgtaacaaacaaaatccaaactatcagctgcttgacacaataacattttttttttcttggttctgcaaaatcccagaagggtgcatctggtcaggaaacaatgctccacatggtcattcagggatccaagcttcttacatcctggagccccaacatcccctacggtttcagagtctgctgaggtttctttgcttttagcttgtagacaagtatcaagagagtctggaggaccttggaggagagggttttttgtttgtttgttttcttttggccaggacaggaagtgacattcatccctttctcctgcttccactggccaaaactgatatggctcttaactgcaagcaagtctgggagatgcagtgtagcagtgcatttgggaggaaagtgaaactgatttcggtgaacacacagccatctcaaccataagggcatatgaatattctcctagagagaagttctgggttctcaaagaactgacaaattcctgaaagtttaggaactcacagtttattcagacaaggaacaatgtacttgatggggtatccacttttctagttataatctcatttttgtcatgcctccctgagaccacacccacatacttgtggtgaaactcagtattccaagttccctttgcgtgtatttacagataaattattcagtatacacttactgagtgatctttaagttccagacattgtgttatggaccagaagtgcagaaataaacaaaacctaaaccctccactcagagagttcacagtaatcgggagttatagacacataaatgaattatttttaaaaaattggcaactgcattcatttatagagattgactctgagtattataagtgtgaggaagagtattgacccagactgagccaagtcttcatggatgaatagcagggactaaagctgggaagagaggaaaggcattcaggacagggtgaagggcaggaccaaaatctcaaagacgagaaagaacatggaataaggtcaagggaatgttaatcagggagtgagaacaggcaggtcagcagggtctggattatagaggattgtaactcagttaagaagattaggccatctgctggattactttgcagatggctaatagtattcattatgtgctgattcttactaacgactcccaaagataaccttaattccacctacaggggcatctgccctctccctcaacacagtatcctatatactcagtggtgttcgtgactgaggcaaagcattgataatgacaataatgacagtgaagatgacaatgataatgatgaggatgatgatgatatgacgatgatgacaatgatgacggtaatgatgacaacaataatagcgacaatgacaatgatgatggtgacagtgatgatgatgacgatgatgataatgattatgacaatgatgtgatgaggaggaaaataatgattacaataatgatgacaatgatgatgagaatgacaataatggggttgatgatgatgatgacaatgattgataatgatgatgacaatgacgatgatgatcaccatgataatgacaataatgaggttgataatgatggtgacaatgactgatgatgatgacaattatgacgatgatgatgatgatggtgacaatgatgatgacgatgataatgatgatgtcaataatgatgtgatgaggaggagaataatgatcacgatgacagtgatgatgatgacaatgacaataatgaggttgatgataatgacaatgactgataatgatgatgacaatgatgatgacaatgactgataatgatgacaatgatgatgatgacaatgatgatcatcatcacatgataatgacaataatgaggtggattatgatgacaatgatgatgacaacgatgatgatgatcatcatcctgatgacaatgacaataatgagactgatgatggtgacaatgactgatgatgatgatcatgacaatgatgatgagcattatgatgatgccaatgacaatagcgtggagaatgatgatgatgacagtgatggtaatgatgatgatgatgacaatgataatcatagctaatatttattaagcagcagccatgctccaggtactcttctaagcactttccagatttaaactggtttaagtttcacaaaaataaataccaaacagttctgagaaacaaggtgaaaaatgcaatgaactaacagttgagcaagttgagctctcatcccaggtctacaaaaaaaaagcaatcaactttaattagtccttattgtacgtgggttttcatgtaatgaggaatttgggatagaatagcatttctttcttttttcaaaaaaatttacacatcaaaattctgcagaacaccgtttttgttttttgttttgttctgttttgttttgttttcagacagggtctcactctgtcacccaggctggagtacagtggtgcaatcatggctcactgtggcctcaactactcaggctcaaagggtcttcccctcagcctcccaagtagctgggattacaggggcacaccaccatgcccggctaatcttgtttgtttgtttttttgtagagatgggggtctcactttgttgctcaggcgggtcttgaagcgatccgcccacctcagcctcccaaagtgctgggattacaggcatggagcattgtgcctggccgagaacagcattttttgatatatttcagggaccattagtctctagtgccattgaattttgaaaaaaaagaaggacaactcgatatactgtattcatcaattctcattttcatattaacttttctgttgagtccttcattaaagaaacctgtttaactttatttcacgtggcatttttccaaacttattttattgtttctgttgtttcttgagcaaataattattctaggttctgtagatacactgcacaaaaaacaaagttcctgtactcattgagaagaataaggacgtcgaaagttgtcccctcaatatttgccacatctgggtaccaccagtactattatttactcaacatttttctttaaatttgcttacttttcttcactttaaaaaattcattttgggagattggttaacatcagtattataatataaaaaagcactaccactttccataaataggaagtacgaccaaaaagaaatactgtactatgaaaacaaaatcccattattaaattctgctagactatcgtccgaataaagctttgagtttgagtcctgctccccacccccctctcttttttgttaaaatgggagattattaagtattagagatgcagtagagaaatactactattaaattgaagctttctcttttgcgtaagcagaaggactaaaaggaccactggaaaatgatttttttctagtctatatttcaaaattatttaatgtgtgtccttacataacctaatgtgatcttgtgatccaccaaaaagtattttgtgtaatgtcattggccccccattttatgctctgagaaacagtggtctcaaggaacaacacaccacggttgtcttggttgtgtatgaaactcttccccagtgctcctggccccaacatgaactggatatgctctgacatgtcattaggaaattggatgctaagcctaggtgtgtagccttcaggccaccatgagaactgtctcagtccatttgggttgccataacaaaataccacaggccaggcatggtggcttacgcctgtaatcccagcactgtgggaggccaaggtgggaggatcacctgaggttaggagtttgagaccagcctggccaacatggcaaaaccccgtctctactaaaaatacaaaaatttgctaggtgtggtggcgggcacctgtaatcccagctactttagaggctgaggcaggagaatctcttgaacccaggaggtggaggttgcagtgagctgagaccagactactgcactccagcctgggtgacagagtaagacttcatctcaaaaaaaaaaaaagtaaataaaataaaatttaaaaagtaccattgactgcgtagcttataaacaatataaatttctgtctcccagttctggaggctgagaagtccaagggcaagtcaccagcagtttcagttgctggtgagggcctgcctcctggttcacagatggtgccttcttgctgtatcctcacatcgtagaaggggctagctagctctctggggtctcttataagggttcttatctcagtcatgaaggctctgcccttacgacctaatcaccttccaaaggcccctcgtaccatgaccgtgggggttaggattttaacatatgaattttgcggcgggggcagggagggaacacggacattcatattaaagcaagagccaaaccaagactcatcctttgctaattcatcgtgattcttccccactcctgttttctccttctgcccttcagggatgcatgaggaatgtgtctttcctttcacctacaagggatctgtttacttcacttgcacccatattcatagcttatccccttggtgtgccaccagagccgtgtacaacggccagtggaagtactgccagagtgaaggtgagtggtatcacattgtccctgccagtggcctttgaatagggtggatcacaaaagagaatgtgtgactgtctatgacatgatcacatttttgcagacaaacggtaatacgtatgcgtgcgtagaaaaggctctgggttttaatgatcgccattctaacttgtgtgagaacacatggacacaggaaggggaacatcacacaccggggactgttgtggggtggggggcggggggagggatagcattaggagatatacctaatgctaaagacgagttaatgggtgcagcacaccagcatggcacatgtatacatatgtaacaaacctgcacattgtgcacatgtaccctaaaacttaaattataataataataaaatttaaaaaaatcagtgataatgtaatgggtaataaatgatatataattactgtttttaatttccacaaataaaaaaaaaagaaaaagaaaaggctctgggatgcctgacaatgaatgctaataatgggtaataatgttaataatgctagtgttaaaaatagtgctctctggatgagggtcttgtgatactgtaagactagttgacccaatagaaccatcccatctttatgcctttcttaattttctaagttaataaggaaaaaggaaacgaagtgtaagaaacgggatttgaggctgggcgaggtggctcatgcctgtaatcccagcaaaacttaactactaatagcctgctattgacgagacggcttaccagtaacataaactgtcaattaacacatatgttttatgtcttatgtattatataccgtatctcataataaaggaaactagagaaaagaaaatgttaataagaaaatggtaaaaaggaggaaatatgtttgctatccattaagtgggaatggatcagcataaaggtcattagcatcatcttcatgttgaggaggaggaggaagaggaagggttggtctcaccatcttgggatgacagaggcagaagcaatggaggaggtggaaggggaggcaggagagacagacacattca[144 bp omitted]tctactaaaaattaaaaaaaattagctgggtgtggtggcaggcatctgtaatcccagctactcgggaggctgaggcaggagaattgcttgaacccaagaggcagaggttgcagtgagccaagatctcgctattgcactctaatctgggcaacagagtgagactctgtctcgaaaaaaagaaaagaaaagaaaagaaactcacatataagtggacccgagttcaaacttgtgttgttcaagaatcagatgtatatggcataggcaaatgcttgatgaaataatgcataaagtctcttctgaaccttatgtctgtcctgtcctatgatggttgattgatgattaaatgactctgtcctgtgaacgactagaggaagttaagacactcacgaactctgttcctaacagattacccacgctgtatcttccctttcatctatcgaggaaaggcttataacagctgcatctcccagggcagcttcttaggcagtctgtggtgctcagtcacctctgtcttcgatgagaaacagcagtggaaattctgtgaaacgaatggtgagcccctgtagcagggatgggatgtgtggtgggagggagagtggacagcatggatcctcctgaggggaggctgggcaaggtagagaccagagcacccagggggaagtacttacaggagccaagtgtctgctcagagagttcgctatgacaacgacagacaggggtatcccgaggccattcgcccagtccccagtccagcatgaaaagacaggagtcctgagaactgaaacaatgagctgaagtcctgatattggcttctgagtatttctgtttctagaactgacaatagtgagattcacccactgatggacccaaactgccttttctttccttccttccttccttgcttccttccttcctttcctttctttcctttcctccctcccttcctccctccctcccttttctctttcttttctttccttctttctttctttctttctttctttctttctttctttctttctttctttctttctttctttcttccttccttccttccttccttccttccttccttccttcctcccttcatctctctctttctttctttttctctttctttcttctgttttttacagggtcttgctctgtcactcaggctggagtgcagtggaatgatctcaggtcactgcaacctctgcctcccaggttcaaaggattctcctgcctcagcctcctgagtagctgggattgcaggcgcccaccaccacacccagctaatttttgtatttttagcaggcacggggtttcaccatgttggccaggctggtcttgaactcctggtctcaggtgatccatccgcctcggcctcccaaaatgctaggattacaggcatgaggcactgtgcctggccctgacctgcatttcaatgcagcctaacatcatattaagtctacacataatcttaggtgaataatgaccaaaattcattgaatgtcctctctgtcctacactgatccaagagctttgtatacaatatcctgttgaatctttccatagcagctctatgagctgctgctcgccaccacctgttcaataaatggtcccagtataactgagcccttcccaaggtcacagtcctacactatattagaattagagcttgagttctagtccatatagttccaaagcccatgctctctccttaagcattgttgcgtccacagagacaaagatgtgtgaaggcagttattcgtaggcatgcttactcttgcgtaaaaatcttaattctgttgttcccttagcactcaacaaatcctaattccatctaaaccttaattttattctagccctaatcatccaccatttgtgttctttactataaacaaaacttaaccttaaatctcactatagctttgtcctagtagttaacctaatctttcatcccaagtccaactctttctccatttccattcctaactctaaattgtatcattaatacatacattccatcattaataaatacattaataatatactctgtcattaatacatcattaattcataaccttagccatttcttaaccctaaaccaaatagatgaattaggaaaggtatcagtgagaccaggctcagtggctcatgcctgtaatcccaaaagggattgggaggctgaggcaggagaattgcctgaggccaggaatttgagaccagcctaggcaacataggaagacccgctctgtaaaaacaagaattaaaaaattaactgatcatggtggtgcgtgcctgtagtcccagctacttggggaggctgaggtgggaggattccttgagcccaggagtttgaggctgcagtgagctatgatcacatcatggcattccagcctgggcaacagagtgagatcttgtctcaaaaaaaaaaaaaaaaaaaaaaaaggaggaaaagaaacatcacttttgtggtaatataaccttaatatctaagctcctgtttatccttaaaactatccaatctccttagacccagttttgatggagtaacagattcaaatttgcataaatcaccaaacggatgtccaagaagagataccttttagctttggcttccccattaggttaagaaagttgttgattatttcctttctatggataagtgagaaccaagaccacccatggctgcatgctactgtctccatgaacatagctttaccgcttcacagtcatcatcaacttgactctactaacccaggaaattcgtgcctgggaagtcacttttattatctgcaaaatgagaatgctaaggctggcatcacagggtttttgtaaagactggagtttattttcatgcaggattgatggtgatgccataccaggtacccaagaaatgtgagctttcttctgctatcatctgagacactaggcaaaaaaatgggctttgaagttagacccgagttggaattctgttgtttcccttaccatctatgtgatcttggacacattagatcatagaagtaataattatcataacataatgaacttttaataagcattttctatgtgccaggcagtattttaagtgcttcacatgaaataactcatctattccatacaataatctctatcaggtaaatgtgattattagcccagttttacacatggacaaactgaggttaatagaagcaaagctgtgattttgatcccaggaagtctaaccttcagaatttgtgctcttaatcaccagtcattactgcctgaaaaccccaaccccttagtcaaattctagctccccatgaaagaccaccaaaggaaattaaaaaaaaaagcctgctaattaggcaagactgagtttattgctcacttccttgacagcatcttaataacgtcttgggctgggcgtggtggctcatgcctgtaatcccagcactgtgggaggccgaggcaggtgaatcacctgaggtcaggagttcaagacctgcctggccaacatggtgaaaccccttctctaataaaaatagaaaaattagcgacgcatggtggtgcatgcctgtaatctcagctactcgggaggctgaggcagaagaatctcttgaacccgggaagtggaggttgcagtgagccgagatcgtaccactgcactccagcctggttgacagagaaagactccatctaaaaaaataaaaaataacgtctcgaagtggggagggaaaactcagcatattgatggggtcttggagtctcgtctaaggtgggtctttcaatgggggatgtgatttggattgtgtaaggatcatgatataatagttaggattggtgttcacagcaaggtgaaatgaccaaagatggggttttaaagagtctaggagagtaaatagtgttttgacacaatcgatatttatgtaactagcttttctggaggcttctggaatgaataatagggctattcgcaactcttatcttcctgggcaagaatttcctagcttagtagagtcaaggtgatggcgaccgcagaaccgtgaagtcgtgttaatagagacagtaagctgtgcacgagttgatagttttggttctcacttatccgtaacattgggataataacgtcatccggaagttgcttggagaatccaatgtgacgttgcctttaatgggataaagcgtggcacagtttgtgtgtcataaatggaagctcttttcatctcctcttcttgacccgtaacctttccataatccttttcagagtatgggggaaattctctcaggaagccctgcatcttcccctccatctacagaaataatgtggtctctgattgcatggaggatgaaagcaacaagctctggtgcccaaccacagagaacatggataaggatggaaagtggagtttctgtgccgacaccagtaatctggggatgggggttgggtgggtgtgggtggagtctttctttcatttgctcaacaaacacctcctgaaaccccactgtgagccaggcactgagttgggcactgaggatctggtgatgaatccggcagacagagttctggctcacgaataatgtcaatgatgtgatatgccacaggctttaaaatccaagagaaaggtgccaaaatgaaatgctcaaaatgttaaacacctaaccatgatgcaaatacagagtaaacacacgccagggtttttaaaaaccccagtgtgagccacgaatggtggctcacgcctataatcccagaactttgggaggctgagatgggaggatcacttgagcctgggaggttgaggctgcagtgagctgtgatcacacctctgtactccagcctgggtgacagagtgagaccttgcgtctaaaataaataaataagcaaacagtgaaatcacccaacaaaaggctcaaacatttggaaaacataatactatactgctaaagtgcacctgttcacagtacaagagctgaagtgagccaaaagagcatccccttgttcccccttgggtgagaacatgtgtgttgggagactcagactcaaatttcctctcctgtgtgtgtccacaaatgaccacagaagcgtcatgagtgtcgatttcatcagtgacaaagtttagcgagttgacgcatttgcacctgtggaatccatgaaagatgaggacactggaattagtcctctgagacaaatcctccatccaccaggtgctcctggtgaccagcattctccttctccctccttcctccagggccctctgtgcttccactctgcccttcttccctattccagtgcctgccctatcttccagcctttctcatgtcctacactcttgatagcttctgagggaagaaaatacccaagacccagtggaaaggaaagggaagtccttgggcaaagaggaactagaaggagttatatttctgcgccactccgggcaaggggtcagtccgaatagctgtgggtgggggggtgtgttgttccaacaacttgggactttcctaaataaaataaattatttctcagctggtcatgggagatgtgacagcaaaaattgagacccatttaccctctgttgcctcaagctgctgtggatagaggcttccagtttgtactatttatggggtcatctttcatgaggacatcatttacgtcctcatctttcatggattccacaggtgcaaatgtgcctactcgctaaactttgtcactcagaaaattgatacttgtggtgcttctgtggtcatttgtggacacacacagagttaggaagtttgagtttgagtctcccaacactcatgttctcagccaagggggaacaagggggtgctctttcggctcatttcagctcttgtactgtgaacaaaattcttctttggcttaggtttaggtcggcattctgagcagtgcccaggcagtgtcttcatgtgtagggtttacccagattttattttttagtttttttttttttttactttttatattttgttttattttattttatttttgagacggaatctcactctgtcgcccaggctggagtgcagtggcgtgatctcggctcactgcaacctccgcctcctgggttcaagcgattcttctgcctcagcctcccaagtagctgggattacaggcgcttggcaccacacctagctaatttttgtatatatgtatttttttagtagagatggggtttcaccacgttggccaggctggtctcaaactcctgacctcaagtcatctgcctgcctcagcctcccaaagtgttgggattacaggcatgagccacaaagcgcagccacattttatattttagagaccggatctccatctgtcacctaggctacagtgcagtggtgcaatcatggctcaatgccgcctcgacctcccaggctccagcaatcctcctgcctcaacctcccgagtagctgggactacaggcatacaccacacccaactaattaaaaaaattttttttgtagggacggggtttcactatgttgcccaggctggtattgaactcctggcttcacatgatcctcctggctcagcctcacaactgagctgggattaaatgcgcgcgattaaatgctgggattaaaggcgcgaaccaccacactcagccccaatttgaaatctagggtgggcctgaagcccacgcctctacgacagtgtgaagcctgaggagtaacctttgttttatccccttctgcttcctaggaatttccgcgttggtccctggctttccttgtcactttccgttcaactataaaaacaagaattattttaactgcactaacgaaggatcaaaggagaaccttgtgtggtgtgcaacttcttacaactacgaccaagaccacacctgggtgtattgctgatgctgaggtgagagcagggaccaacagtggtcatttcacggatgcagaggtgagacaggtgcacaactggtgtgtcactgatgcgaaggcgagatctgctttttcaagcgtgtctgattagcgtcgctgatgtgaaggcgagatctgttgcttttccagcatgtctgattagctgaggttcccagcaatgcgggctcctgttgtcaaagataaggtggagttggggaagactggaacaactccccagattagaaggatgaaagaaattgggatttcccccagaagcaggagagcagagggggattggcaaactttttcagacccaggaaggtatcattccaagtttcaagtctgggaggctttggctgttgatgattagaaaagtggaatttctcaaagtggagcatggtatgaaaaaacaacccagaaaaggggataactgaccagctgtggtgactcacacctgtaatcctagtgctttgggaggccaaggcaggaggatcagttgaggccaggagtttgagaccaccctgggcaatgtagcaagaccctgtctctacaaaaaaaaaaaaaattagttgggtgtgatagcacacatctgtagtcccagctactcaggaggctgaggtcagaggatcccttgaactcaggagttgcagtgagctatgattacaccactgtaccccagcctggggaacagagtgagaccttgtctaagaaagaaaaagagaaagatggacgaaaggaaggaaagaaggaagaaagatgaaggaaggaaggaaagagagagggaggaaaagagagaggaagggaagaaaggagggagggagggaaggaaggaggaagggagggaagaaagaacggaggggaaaggaaggaaggagggaaggaaggagggagggaaggaagaaagaggaaagaaaggaggtagagagagggaggaaagaagaaaggagggaggaaaggaaggaaggagagaagaaaggaaggagagagggaaagaaggaagggagggaggaaggaaagaaggaagggaggaaggaagagaggaaaggagggaggagggagggaggaagtgagggaggagggagggagggaaggaggaagggagaaagtaggaaagggaggagggaaggaatggaggaagggaggagggaagggagggagggaaggaaaagaggaaggaaataaggaaggaagggaggaaggaaagaaggaagaaaagggaagggaaaggaagggaaggaagggagggaggaaggaaggaagggagggagggagggaagaaagggaaggagggaaggaagcaaggaaaggaaggataacccagaagccaagacaccatggtgtgcatccattgcccccatcactgagtagctgaccaagggaaaaatggggtttatttctcttccttcaccatttgggcctcctgccccacctcagcccgctggtcatcaagtacctccacagaaccaactttatccctcttttctttttttcttttttctttcttctttctttatttttttctttttctttattttatttatttattttttttgagacggggtctcactctgtcgcccaggctggagtgcagtggtgcaatctcagctcactgcagcctctgcctcctgggttcaagaaattctcccacctcagcctcctga[221 bp omitted]acattcttcacaaaggaccagctgattgaagcaggtggtgcagagggtatttctaaaggtggttatttaagcttgaaagatgttctccagcctgtagaaatggtctctaaatctcccgcatggatcaactgacctcactgctctgtgacttctggaatctaaataaaaaaagagaagccctttcatcagatgtgtagacaaaaccccatccctcctccctttggggtggaaaaccctggtggttctagcaatgtctgtccttacaatgcatgtggcttatggatgacactaaattagcgggcccttcctgaattttgccttggtaatgaaaatcatcttcctggaatagaggagagggaaaggagggggtttggaactctgggcaccatcttaacagggtagatattaaaaaacacccacagtggcgttcagtctgtggctaggactaggaacagcgtccagcctctgacttctgtccatcacagcagaactggcactttgcaggtccccttccccttagcatagaggtgagattgaggagctcattgttcattgatctccttgctcctatgagctaggcagggatgtgggggtgggggcgtctgattcctctcagctcagctgcttccgactaagtctggaaaaccaatacaaagtcatttttaattcaccttcctctttgagtcaatgcctacttattcattaaactcagatctttgcttctattttcaaggaaaggagaaatatcttcagaggaagactgccgccatactgaggctgagcacagatttgtctttttcattgcatctgtcaagcttaaataaccacctttagaaataccctctgcaccacctgcttcaatcagctggtcctttgtgaagaacgtagagagaatgcggcataaccaccaataaaggagtcttgatttaaccctgggatctgccttttctgcttcctaagatgagaccgatggtgaatgtgtggggaaggaaagattggtagccaggctgtcgagtctcatagtgtggagaggtcagactctcaggccagggacctctaggagtcattacagcctgctctgtcttctgagggaaatcacagatttgggtggggtgtttgtagatacatattaaattattaatgaataaattaggaagtaaacagagggtagaaaattcaccacaagactgcctcaaccattccctccctgtgcccatggcagatatcaagaactgattacagaatctgattccctctcagcccagatggaaattcacattgttgttcttgttctttcttcttcttcctttcactcttcttctccctctcctcctcctccatcttctcctccttctcctccatgtctcctcttactcctctcctactccctcttgtcctccttcttctactcctccctcttctcctcctccctctccacctccttctcctcctccctctccttctcctcctccttctcctcctccctctccttctccttttccctcttcacctcctccttctcctcctccctctccttctccctctcctcctcctccccccgcctccgtgtcttccttgtgctggaattctcttaccccttgtcttcctgcagtctcctcctcccttcactcattgtccgtggaattgcccctgtgatggagatagacgtgggcttcctagatcccccttcaagaaaggacttgctgcccagctccagtgagtgctgtctgcaggcagcctttggtgttcagcccaaatcagagatggtctcagcttcaaaatggcctccctcgcccaaaccatgcccttcccagggtaggccacaactaacgaatgaccaatgctgggtttaaaggcctggctattccagtccaagtgagataactcaaaaagagctacatccagagctcccgtctgttccgctgaggttgtagagcctgcaccgtggctcaacctctccctctgtccaatcccagttccttcccttcccttccataactgatcccaaggaaactccctgataagcctcctgcctgctgtctctgctcttggacagaggaggagccctggggaacccaacctgagacagctcatctttaagagatgcccattctggcagggcatggtgactcatgcctgtaaccccagcactttgggaggccaaggcaggaggatcactggaggccaggagtttgagaccagcttgggcaacatagcaacactctatctccacaaaaaaatacaaaaatcagctgggtttggtggctcacacctgtagttccagctacttgggagactaaggcaggaggattgctttagtccaggagtttgaggctgcagtgagctgtgattgcaccactgcactccagcctgggtgacagagcaagactctgtctgaagaaaaaaatagagagatgtcccttctgaccactctgattaagccccttccccaaattatctttgtatccaaccatcccaatttatcctcaaagtatttgtcccaatctgagctgcttctgatggatttaattttttactcccctggcactggaatgtagcctgcaagaaaccaaaagaccttattgctgggcacattccaggacctagaataatcccaggcatataacatgaaattgtgatgtccaatatagtagccactagccataaggagctagttacatttaacttaagtaattaataacattccttaccgatatggtttggctatgtccccaaccaaatctcatcttgaatgatagctcccacaattctcattccatctacacattcacccatcttccccttcatttcttcagtcacccattcaaaaaagattttctaagtacctggtctatgcctggcattgttccaggtaatggaaatagagcaaggacaaggtatttggcctcaacaagcttatattttgaaacatgcaattcaatagaatcttctgcgaggatggaaatatggtttggccatgtccccacccaaatctcatcttgaattgtagctcccataattcccatgttacctattgatgtggtttggctgtgtccccacccaaatctcatcttgaatcatagctcccgtaattcccacatgttgtgggagaaacctggtggaagataatggaattatgggggaagtttccttcatactgttctcatggtagtgaataagtctcacaagagctgatggttttatagggggaaacccctttctcttggctcttattctatcttgcctgctgctgtgtaagacgtgcctttcaccttccgccatgattgtgaggcctccccagccacgtggaactgtgaggccattatacctttttttctttttctttttctttttttttttttttgagatggagttttgctctttcactcaggctggagtgaagtggcatgatctcggctcactgcaacctccaccccctcaagttcaagtgattctcctgcctcagcctcctgagtagctgggattacaggcatgcaccaccacacccggctaatttttttatttttagtagagatagggtttcaccatgttgatcaggttggtcttgacctcctgacctgagatgatccacccacctcggcctctgaaagtgctaggattacaagcatgagccaccatgcctggcctctttttctttataaattatccagtctcgggtatgtctttatcagcatcatgaaaacagactaatgcacttatgtattcattaataaaactgttctcacttgataaaaataaaataaaatttagtttctcagccttgctcacacatttaatactcagtagtcacatgtggctaccataataaacagcgcgggtctggaatatttctatcctcgcagaagattctattgaattgcatggttctaaaatatgagactgttgaggccaaataccttgtccttgctctatttccattacctgaaacaatgtcaggcatagaccaggtacttagaaaatcttttttgaatgggtgactgaagaaatgaaggggcggatgggtgcatgtgtggatggaatgggatggagctgaggaaagagcttgagattaggaaataacattattctgcttccactttttcttttttagagacagggactcactctgtcacccaggctgagtgcagggtgccatcttggttcactgtaaccttgacttctgagttcaagctttcctcctgcctcagtctcttgagtagctgggatcacaggcacacactgccatgcctggctattttttttttcttttctttctttctttttttttttttttttttttgtagagatagggtctcatgttgccaggctggttgtgaactcccagcctcaagtgaccctccctcctcggcttccccaagggctccactttttcttaatttttttattttataaaacaaagctattggctgggtgtggtggctcacacctgtaatctcagcactttgggggagctgaaaagggtggatagcttgagcccaggagtttgcaaccagcctgggcaacatggcaaaaccctgtctttacaaaaaaaaaaatacaaaaattaaccaggcatggtggcatgcacctatggtcccagctgaggagggtgaggctgaggtgggtggatggcttgagcccgggaggtagacgttgcagtgaggtgagatcactccagcctggacaacagagtgagaccctgtctcaaaaataaatacataaataggctgggtgcagtggctcacgtctgtaatcttagcactttgggaggctgaggcaggcagatcacatgaggtcagttcaagacagcctggccaacatggtgaaaccccatctctacttaaaaaaaaaaaaaaattagctaggcatagtggcacacgagtgcacgcctgtaatcccagctactctggaggctgaggcgtaagaatcgcttgaacccagaaggcggaggttgcagtgagccgaattcgcgccactgcactccagtctgggtgacagagtgagactctgtctcaaaaataaataaataaatgcatgcatacatacataatacataaatacaaaaataaaataaaataaaataaaacaaagctattgaaccagatgactcattttaaacatctaattcatggacttcaaagcaagaaaaagttggaggaaggcatgaagttaattctttattttgacttttattttaacctttgcattgctggagtgtcttgctttgggcggaggtcaggaggaatctctcttttctgtttcatggcacagatcgatgtcaggacgtgagggacggaacagacgacccatctaacagagacacagcctctgggtggtccaggacagaccagcgcggaggtaggaggcttctaggaaagactttgcaacaacctggctgaactggggatttgggggatcctgtcatctctctctttgcatgatgacattttttcaggggattaattccccaaggatcagctagctctaaaccttgataatccagatttgtggtttaattcagtcccctgagtatcttacacaaaggaagggatgtgggaggggagacagagacagacagacagagagagagagagagagagagagagagagagagagagaaaccagacagtgcttccaggaaatcaggaaaaggaaggagttgactttgaatgccacttgcacgagccatttccaagcccagcctcaacaacaactctgtttccagctctgtgactgatttgcatcctttttatttcattttgtatttctatagatttagggagtacaagtgcggttttgttacatggatatattgcgtagtggtgaagtctgggctgttcatgtaaccatcacctgaataaagtataatttgtccccttaccgggagagagaaacgggatttgcaacagttgatgcaggcaggggaagagtagagactacgttctgaaccttttgatacccaacaggagaagagactattttcacccaaggggaagctggggaagagactctggcaggtcacagggacttaggactacgtgaagtgaaaagatgtcaagaatcattggaatttttgggggtggcaactggaccctcccacgcttcctatttccatccacagactcttccttcttaatctagttctgcagacgcccccatcctggcaaagataccgctctgggtctcaccccatgcacagcgccgcatgccaatgccctccctcccgcctgccctccctctctgctttaaggggatctggggcttttgggctttggttctccacaagcgcttgctccatgttgaccaggtggagagggtctggagcttccaggacctcctcagcgagacatcatcttcacaaactctgcaaagaaaaaaaaaaatccccagtaaggcatctcgttgtaaaagcccccaacattattttttgagcccttcctatgtggcaggcactgctggtgatccctgggaaattacttaatccctctatgcttccatttctccatctatgaaatgggaatcagatctctgtggcaagttacttaaccctgtgcctcagtttctcatctgtcaagttggcatgtttaatagatctacctcatgaggttgagataaaattggcttacaggctgggctcggtggctcacgcctgtaatcccagaactttgggaggccgaggtgggcagatcgcttgagcccaggagttcgagaccagcctgggcaacatagcgacacccccaactctacaaaaaaattaaaaaattaaataggtaaataaaatttgctcagaaccgtgcctgccatcacagtcaccccatgtaaactactgtggttattattatgctcctacttctgaaagactaatttcagtatgttgcagtttcttcatttctgttatgaaaataatcttgcatgtaaataaaacattaaatttaaaaaatgggaatcctagtattgctatttccttatatggtttttaagaccattaatggcataatgctcacaaaacagattaagtatcccataaacagctattgttggccgggcgcggtggctcataactgtaatcccagcactttgggacgtca[134 bp omitted]gaggcaggagaattgcttgaacccaggaggtggaggttgcagtgagccaaggttgcaccactgtagtgcagcctgggtgacggagtgagactccatctaaaaaacaaaacccaaaaaacctgtgattgtcactatgagatttcatcatctcaaccatcctggagggataagtgtcactttacagataaggaaacttacgccagcgagggtcaccaacatacctgaggccacgtggatagtgaatggtgaaccctggaaggaatgcaggttgcacctgactttgctgtggctcaagacgatcttgctgcccacccgggtcttgaggtcatcctgaccttcccttgcctttggttggcctgaggatcatctcccacccccaccccaccttctccagatgtcacttgatgtccactgcacacctaatcctggctagatctagcaggtgtccaaccagcctctactgtgtttccatactgggacatacagcatatatggtttagagaatggcccttcctcctctctatctaggatggaggccttggaagctaatacaactcaacacagcaaggtctgctgtgataacttccatggagaggaacagaaaaacttctgtaagacttcacagctgggaggaagacatgagggaaggatggagagaagcttcctgacaaaggttgccttgatgtgagttcctgagggatggatgagactgaaagatgtggtaagtggacggagcatctgatgcctaggaacggaggttggagaacataaagcaggcaccaagtttgtgccagaacttaaaagttcagagaatagctacagaagatacaggctgggtgggtgggcgaggccagatgatggatagacttgcatatcagacaaataattttggactttttttttttttttctggagacggagtctcgctctgtcacccaggctggagtgcagtggggcgatctcactgcaacctccgcctcccaagttcaagcaattctcctgcctcagcctcccaagtagctgggactacaggcacatgccaccacccctggctaactttttgtatttcagtagagatgggtttcacggtgttgcccagtctggtcttgaactcctgagctcaggcaatctgcctgccttagcttcacaaagtgctaggattacaggtgtgagccacgcgcctggcctttttttctttttttctttttttgagatggagtctcactgttgcccgggctggagtgcagtggtgtgacctcggctcactgcagcctccacctcctgggttcaagcaattctcctgcctcagcccccgtatagcctgggactacaggcgtgcactgtcactcctagctaatttgtatatttttagtagagatggggtttcaccacgttggcccccctggtctcgaactcctgacctcaggtgatccgccaaccttggcttcccaaagtgctgaaattacaggcatgagccactgagcccggccagaattttggatttttgtccataagcagcagataggtgctgagatctttgaaccaaagaatgtcacaattagaacttgacatgcttttttttttttttttttggacggagtgttgctctggagtgcaatggcgcgatctcagctcactgcaacctccgcccccagcgttctagcaattctcctgtctcagcctcccaagtagctgggattacaggcacctgccaccacttccggctaatttttttgtattcgtagtagagacaggattt[144 bp omitted]tctcatccatgtagaaccccaatccttttcacttattcagtgatccaatatactcatgctgggctcagtgctaggatttggggatatagtgatgatgaaggaattggtccatggtctcagaaggaaataggcaataaactctagagatgccacgaatccgtattactgcagaagcaagcgggaggtattactggggagccagcagagggacacggagcccagtaagagaggtgggaggtaccttccaggaacataactaggagttagccaggggagaggggaaagggtattccagacggaaggacaacttgagcaaagacagggaaggaaaatttaaaaatacagtggtgctttgtgcatgatttcttttagttttctccaaaaggtgtcatcatccacctcattttacagatgggaaaactgacccttaaagagaaaaagggagtagcataagccacatgctgagtcagcgatgatcctgaatttgaagcccctgaacctgaccccagagctccagctgctagccagtccagtctctttctgatgggacaagttcttcctaggataaaaggtgccctgcaaactaacaaggaatgggcaaggcggaagggcgtcctgagcatgggaaggaaagggccttggctgaggtgttcctcggagccaccagaagtgagcgacacccagctctttgaaatgaatagcctgggaagaaagggacagaacaaatgcttccaaaacctgccacccgcttccattctcaaacttggagaggagtgagaaggagtggccaacttggaaaatctgacagtgagttggaagtggattcctgcggtggctgcccccgctccccaccacgccccgtcaatgtcaccttcaaagtcaactgtgccgtctccattaacatcagcctcccggacaacctcagagatctcccggggggtgagccgctcccccaggagtctctgcatggcctgctgtagctccaccagggtgatctccccatctccattcgtgtcaaactgaatagaagcagaaatagattatatcagcaatgacaatgatgatagccacgagatgatggagtttacctatcgcttactgtgggtcaagcactgagataaaagctttgggaatgtgagccactagaacgtcagctccaaaagacagttttgttctgtttttttttttctttttttctttctttttttttttttttttatttgagacagtctcaccctgtcacccaggctgaagtgcagtggtgcaatctcagctcactgcagccttcacctcctggattcaagcgattctcgtccctcagcctcccgagtagctgggattacaggcgcgcaccaccaaacctgtttaatatttgtatttttagtagagacagggtttcaccatgttggccaggctgatcttgaactcctgacctcagttgatccacctgcctcagcctcctaaagtgctgagattacaggcttgagccactgtgcccggccgaaacttttttttaatgagacggggtctcactattttggccaggttggtcttaaaatcttggccttaagcaacccttccaccttgtccttccaaagtgctaggcttacagtcctgagccaaagtgcccagcgatacatttaaaacttactttttaggtgatttttgaaacatacattattatttactatagttatcctgctgtgcaatagatctcaaaagttattcctcctgtctaaccaaaactttgtaccctttgacaagcaactgtccattccttctctgtggctccccagcctctgctaaccacctttctttttatttgcatgagttcaattttttaagattctgcatgtaacatcatgtggtatttgtccttttgtgcctggcttatatagcttagaataatgtgcttcatgtttattcatgttgttgtaaatgatagagtttccttctttttaaaagctgaatatgccggactcagtggctcatgcctgtaatcccagcactttgggaggccaaggcgggtggatcacctgaggtcaggagttcgagaccagcctgaccaacatggagaaactccgtctttactaaaaatacaaaattagccaggcgtggtggcgcatgcctgtagtcccggctactcgagaggctgaggcaggagaatcgcttgaacctgggaggtggaggttgtggtgagccaagattgtgccattctactccagcctgggcaacaagagcaaaactgtctcaaaaaaagagaaagaaaattttaaatgacccatgctgcttacattgtatttattttggatgacacagctgtaggctgaggaagctgcaagttaacaagtgccgtaaggcaggaaggtgtacttgaggaagaggcagaagtggggagtgtttagggaggcgtgagctggggagaaatgagcatgaaatagacaaggtctcagtgttgcagaaggcagggcccaagtacgtaggggcttgtgtgtcatgggacgttgtcaggatttggttctgagtaagacaagaagccactggagaattttaagcaggggagtgaccagatctgatatacattttaaaagaatgtgagcatgaaaccctgttgtgtagagaacagaccacagtaggaccacgatgggagccaggaaaccaattagagggccgccatgatcatcctggtaggagatggttgtggtttgagccagttagcaccagcagagctcaagaaggagagttcactccccgatgttttggaaattgaacgtactagactttctggtagactagttaagggtgtgcagggcagagctttggaggcagttcattaattcaacacatatgtatccatattgctaaaaaaaaatgtgtcagtagtgcccatgtggaaggcaccgttcttgggactgagcacggagcagcaagcaagacacttagaaatacttgtcttctgtacctggcttatttcacccagcatactgtcctccaggttcatttgtgttgttgtgtggggcaggatttccttcttttgtaaggctgaatattgcatttaaatatataccacgcagaaggagaaatactgcatgattccacttacatatgaagtacttaaaataaccacactcatagaagcagagagtagaaggatagttgctgggggttaggaggacagggaaatggggagatattgtaccatgggtataaagtttcagttacgcaagataggttctagagatctgctgtgtggcattgtgcctataattaataatactgcataatgacaaatattgcttttaatggcaaaatcacaattacttttgcatcaatctaataactatgggcaaaagacgtgaacagccatctctctaaagaggacaaatgggcaaaagacgtgaacagccatctctctaaagaagacaaatgggcaaaagacgtgaacagctatctctctaaagaagacagacaaatggcaaacaagttcgtgaaaaaaatgctcagcatcactaatcatttgggaaatttaaattaaaaccacaatgaaatatcacctcacatctgttaggatggctactgttaaaaagatgaataataacaagtgttggtgaggatgtggataaaagggaaccctggtacacttttgctgggtatggaaattagcacagctattatggaaaatggtatggaggttccttagaaaattaaacctagagctgccatatgacccagcaataccacttctgggtatgtatctaaagtaattgaaatcagtatatcaaagggatgtttgcactcccctgctcatggcagcactattcacaatagccaaggtatggaagcaacctgtgtccatcaaaacagaagagtggataaagaaaacatggcataagtacacaatggaatactattcagcttttttttttttttttttttttttttgaggtggagtttcgctctttttacccaggctggagtgcagtggtgcgatcttggctcactgcaacctctgcctcccgggttcaagcgattcttctgcctcagcctcctgagtacttgggattacacgcatgtaccaccacgcctagctaattttgtatttttagtagagacggggtttctccatgttggtcaggctggtctcaaactcccgacctcaggtgatccacccacctcagcctcccaaagtgctgggattacaggcatgagccactgcacctggccttaaaattttctagtagtgacgtttaaaaaaatgttaaaaggaacaaatgaaactaatttttaatattctcttttatttgacacaatatatctaaagtgttatcctttcatcatgtaatccacttaaaaattattaatttagctatgtaagtagcattctttttatacacactggatttcataaggcagtaagttctaagttcttagtaggtgcttagcatgcttaattaggatacttagcctagaagtttacttaagtatacaagtacgttatgctaattatattagcatactaagtcttaatacagtgttcacgttacacttacagcacttctcaatccagacaactttttctttttgttttgagatggagtttcactcttataacccaggctggaatgcaatggtgcgatctcagctcactgcaacctctgcctcccaggttcaagcaattccctgcctcagcctcccaagtagctgggattacaggcgcccaccaccatgtctggctaaatttttttgcatttttagtagagacggggtttcagcatcttggccaggctggtcttaaagtcctgaccttgtgatccacctgcatcggcctcccaaagtgctgggattatgggtgtgagccactgagcccggccagctgtagatctttataagaagctgggggaggcacttgcacagccaataggtggaggcctcctaggatttgaacccatgtttgcctggttccaaatcctttgctcccaaacactctactactctttattttcaccttgtgttgctgaaagctctcagaacgagaaggtattttatcaggggatataagcaagtctgttattctcactgggtctgatattttttagtatgtctgcagcaagtggttcgtaccagatgaccactttgcattcccttctgggatctcaaattcttggattcttcctgttacaggcactaagaatagaggccctggccaggcacggtggctcatgcctgtaatcccagcactttgggagaccgaggcaggtggatcacttgaggtcaggagttcgagaccagcctggtcaacatggtgaaaccccgtctctacgaaaaatacaaaaattagctgggtgtggtatcgcgcacctgtaatcccagttacttaggaggctgagacaggagactggcttgaacccgggaggcagaggttgtagtgagccgagattgcaccattgcactccagcctggggacaacagtgaaaccccgtctcaaaaaaaaaaagtcctaacatttattctagagatggcaggatcttggataagatttataatcttcatgagcctcacttttctcatctgtttaattgggatacatgactgcttgcttactcctaatgtgtttgtgtgcgtgtttttgtttttgtttgtttgtttttttgaggattaaatcagataaagtatacagaggcattgatccattgcaggtgtttggaatacgttatttttcttccctatttattgatcccaccatggctggaaaaaaaaaggtgggggcctggttggtgggtgctgtccatggcattggctaattacaggcagacctcagagggtctgcctctaccatcaccagcaccatgacactgttaactcacctccttgaaggcatcccgcatctcctggacaccgatcatcccagctgtttctgcaagcaatttgggggtcatcagctccacaaagtcatcaaagtctacacggccacccactgaggaagatggcacaggattagcgagaccccacaagccctggccttccattacctcactttgtgcttcgagtcagttagatcagctcccttctccctgccctataagagccgtctttgacttcctccctccagcagctaactccaagctccaaactcatgtccctctagcctgaacaggagtggatagggtgtggtatggtggaagtaactgcctgtgtgactttcagacagttggttaagatgtttctcctcctctgtagacctgtacaaagaggagcatgaattaaatgagcatacaatttttttttcagatatgaatactatcattaccttgaa[136 bp omitted]aacctctgcctcccgggttcaagcgattctcgtaccttagcctcccgagtagctgggattacaggtgcacgccatcacgcctggctaattttttgtatttttagtagagacggggtgtcaccatgttgcccatgctgttcacaaacccctaacctcaggtgatctgcccacctcagcctcccagagtgctggaattacaggttacaggtgtgagacactgcgcccagcctcaataggaattttattctagctaaaatctaaaaatcagttatgatctccatccaaaaatccatccatcctttttgcagctgtattcaccaacattagctccagctccaagtttgtttccaacatccaatacagctccaatctcgtgctccactgatgaatcttagtggtgatagtaataactacctttaataagaatttactggaggctaagactttaactgcatcagcatctttatctcttccttctcttcctttccacagtcccatgaggtaaggagagaggcatcttcctctatagatgaggaaatggaaactgaagagtagcggataacttcacttttcaaaatgactgtaattagtaaataatagaactgagatttgaacccagacctatctctaaaagcttttaaccacttcaaatgctgccttcctgagtcgaatctgacctgttttcttccagacttctagtccctctcatcctcctctccacccccaactctactcttaacctctacatccttcccaattctgccctgatcccttccctaaccccggccatccctcccattccctggactcacggttcatgcggatttgctggccgagctcaatcagttccatctccgtgggcatgtaacccatcgtcctcatgagattccccagatccttacaagagatgaacccatctcggtccttatcgaactcaagaaatgcttcccgcagctctgaaagttaagagagaactttgggggaacttgaagcagtcagtggggaagagtggcatctcttgaagctatcaatgaggctccaactagagactccttaaaggagcgtacattagaaacaaaacaaaacaaaacaaaaaaaccaaggccggatgtggtggctcatggctgtaatcccagcactttgggaggtcgaggtgggtggatcacctgaggtgaggagtttgaggccagactgaccaacatggcagaaccccatctctactaaatacaaaaaaattagctgggcatggtggctcatgcctttgatcccagctactagggaggctgcctcagccaaggcagaagaatcgcttgaacctgggaggcggaggtagcagtgagaggagatcgtgccattgcactccagcctggcaacaagagcaaaactctgtctcaaaaaagaaaaaaaaattcaaaaaggagtgatgtatgaaatgtgttagcaaaagaggcatcattcctgagaccactaaatgagagcactggcgtccttcagattcctggatgaagttatggggaacctcaaagtcaccaagagagaaactcatttgttttcactcctgagtcttggagatacttgaggatggatatgccttcgaaatactttgggaagtccttcaactgccacgagaaagagttctacaaaattacagttgagtgggaagagagagggattgtaaaaattccatgtaatggaatttatacggaaatgcacaaagggactgagggcaggtcaggtgggtggatggcaacgtggaagcaactggggaagacggtgttaccttcaatctcatcttgtcccagtggtctttcctggaaaggaatgcagatgagagggaatttggagagagggtcacccattctccaaagggtctccttgttctcccaagctcctccccacgctctcgtggttctctttccattctctctctcctcctccatccctcccattccttttcccatctcctgactcctgttccacagttcttggctccccacccccctctcgatgtctctctcccacccacgaatcccaatctccctttttctccctttctgagacaaacacccatcacattgtgtcaaagggggtcttaaacactggggagtccaatctccagatgaaaaaagtgagacttcacaaccacagctaactcattcagagtggtgactctgtgccaggcagtttccacaatcatttcatttaaacctcagtactgctctgtgatgcagatctacatctcgtttccatcttacccatgagaaagctgaggaacagagaggttaaggaacctgcacaaggtcacacagctcacaagcagcagatcccctcccaagggaggaaggcattcacctgctccctggaggtcatggggcaagtcagacacagtattgggatttgaattcagggctcctgactcccaagtcagaattcttcacactagcccccattcactcctttctcacctgcctccaatcttcctgccaaaggttagaatctctgtgcatggaaacagcattcaatggctttcaggcaggagggtcagtgccagcatgaccagttcctaaacactctgagaatgtccagttattgctgccccacctactcctgcacatacctgaagggttgggcttacatatacatggcatgttaacaaggaaattctactgacctctggtctctttagccttcccatctccctttatccctggagcctttccctcagcttctctttcatctgatcccctccttgcggtcccttatcaccctttttttcattctctctctcttttttttttttgagacacagtctcgctctgtcacccaagctggagtgcagtggcacgaactcggctcactgcaacctctgcctcccgggttcaagcgattctcctgcctcagcctcccgagtagctgggattacaggcgcctgccactgcacccggctaatttttgtatttctaatagagacagggtttcaccatcttggccaggctggtcttgacctcctgacctcgtgatccacctgctttggcctcccaaagggctgggatcacaggcgtgagccactgcctggccttttttattctctttttttggtgatcttaaagcctaacaatgaaaagtatgcccacatatctggacaagttggtatatatggaaaaataaaaaaattttaaaaagcatgcccacaggaatcaagcaaacccgaccctgccacttacttttttttaacgagacaaagtctcactttgttgcccaggctggagtgcagtggcataatcagggctcactgcagcctccacttcctgggctcaagcgatcctcctgcctcagccacctgagtagctgggactgcagatgcatgccaccatgctgagctatttttttgtatttttagtagagatggggtcttgtgtttcccaggctggtctcaaactcctggacataagtgatcctcccgcctctgcctcccaagatgctgcgattcaggcatgagccactatacttggccgaccctgccacttactaactgtgtaagcttaaggcaaatgacttcatgactcagagcttcactttcctcacctgtaaaatgggaatgaaagtcactgacctcatgagttgttctgaggtgtaaataacatcaggtgtgcaaatccctttgcacagggctgggcacagaacaatgacttaataagtggcagctattgttattaacgtcatcattatcatcaccaccaccaccatcatcaccaccattatcacaatgagcatccatagaaaagaatgatggtaatctcaacaatgacatcatcccactttcccttttcatttttcttccttttctctccttctctttgctcctgacttttgattttacccccacccatttatctcactggcttacatgaccccaccagggtccttggaatttcttataccttctcagctcctgctctatccacctgttcccctggttctgtggcaccatcatgtccccttctttgtcccacacccctgctccctttgccccgcccaccgcccttccccctcactccccacctcacccgctgtttctcagcaatgcctttcctcaagaagatgcaggcggggcccatggggaactgcatggaggggtggggtggagctcgcagggcaccagtctcaagatggcccctcctccctgctccctgtcggagctcagcctccttatcttctccagcactcctttgccacctcttcctgcctctcttggcttctccttcggtcccggtgtcttagagctgtgacagctgggctggaaatctctacccgggttggggagggaccagagctgtccctgcctccccatctggcttgaatgatatgggtggggaaatgcagagtcaggttctgtgacgcctttatccccagagtggaattggaaagtgcattttataaatggggattagaggctggatgtggtgctcatgtctgtagtcccagcgctttgggaggctgaggtgggaggattgcttgagcccaggagtttgagaccagctgagcaacatacggagaggctgtctttacaaaaaataaaaaaattagccgtgcatggtggcacacacctgtagtcccagctgctccaaaggcagagatgggaggattgcttgagcccaggagttcaaggctgcagtgagctatgattgtaccattgcactccaggctgcagtgaactacgattgcaccattgtactccagcctggctgacatagtgagaccctgtctcgaaaaaaagaaaaaaaaagaaaaaaaagaaaagaaaatggaggattagagcagacggcatcatttattcaatgttccaacaagcatgtgaagggtcactccaacactggcctctgggcagtgagatggagagctcagcacccctggcctcagggagttttcctgggtgagtcgggaatgtgtgagagtgagcaggatgcaagcatggacttcaggaagtgggcgtacacggtgactaagagcatggcatttgctcttcctctgttcatctctttccttctgtctttcctgaatgatttagagggaaaaagcaaggtgggggtgtcagggagggtgtgaagttatggtggtgtcaaagcccaaaggggttttgcgactccacactaggtagggttaggggaggagggggctgggggccatctggcgtggagagccagcattccagtggggtagtggggtgaggagaagtccacatagaggggcagcatgacccagggtgttggggctggagatggtggggataaatccacagatgggcagcttggtgtgcagtgttggaacatgagctgagtggggcgggggcatttatatgcaggcattgtctggggtggaggtttgcactgtaaggcaattaggaaggaggccacatagaggggatctggcatgggttgtcataacccaagcagagagagaaatgtccactcatgggaatagcatggtgtatggtgttgaagccagactaggctgggaaagacatccccacaggggtgaaatggcaaaggaaaagggaaattggctacacacagtgagtaaggggaatgggggccaggtctcctactgttggaaaagggagttactaagacagaaaggaggaaagtcgaatgagccctgtggtgttggactataactggaggcgttggtatgtcctcatggatctcaattatacatagagagataaaaataaacacatagtttcagtgtgtataggaacatttgtacacatattctctagctctctccactaagagaacatagaaacaatgatggcccatatgaatgagcaccactagcatccaaatcttgacttctatataccattctccaccaaatggaaccagagtgcctaggaaatttggctgattccatgtctagagcaaaaaaagaacaagatgagcctacaaacgtcctatgcttaaagcaagaaattgctcaaagtgttgtgagaacatgtggaaagaacacaggagtctgcttgaagaagctccattggccatactgggcagtttgagagtcaaaataaataatgatagtaacaaattatacaggaccacagaagaaaccaggagtccatactcagataaataaaaagctaagtgagaagtttgatatttacagagctcaaaatacctccctacaaaataccaatttcaaaggagttacgttatagtggagaaacgtggcaaacaccatcttagtcaatgaaagtggacatcatcagtaatgtgacaagttggaatttcacaccacctgacaggatgtcacgagaacagcatcgcttctgtaagattcctgaatctcatcataatcagacgtcagacgaacccacatggagggatggtttacaaaataactggcctgtaagcttcaaaaatgtcaaggtcatgaaaatcaaggaaagattgaggaaccgttcgagattggaggagactaagaagacatggccgaggctgggcgcgatggctcacacctgtaatcccagcaatttgggaggctgaggt[132 bp omitted]gaggcagcagaatcgcttaaacccaggaggcggaggttgcagtgagcccaagatcgtgccattgcactccagcctgggcaacaagagcaaaactctgtccaaaaaaaaaaaaaaaaaaaaaaaaaagctacgactgaatgcaacacagaattctgaacaggatccttctgctatcaaggtcttctttcggatgactggtggtttgctggcaatagtttggcggcccttggtcagtagagcctcaccccaatccctgcttccatgttcacatggtttcctctctgtatacatgcctgtctctgtctttaaatcccccccccttttttaaaagaattttatttcaaatctgggatacatgtgctgaacatgcaggtttattacataggtatacatgtgccatgctggtttgctgcaccaatcaacccgtcacctaggtattaagccctgcatgcattagg[137 bp omitted]gctccacctcctgggttcaagcggttctcctgcctcagcctcccgagtagctgggactataggtgtgtgccaccatgcccagctaatttttgtatttttagtagagatgaggtttcaccatgttggtcaggatggtatcaatctcttgactttgtgatccacctgcctcggcctcccaaagtgctgggagtacaggcgtgagccactgcgcccggcgaaatctctccttttcataaggacactagtcattgtggattagggtccacacgagtgacctcatcttcacttgatgacattggtaaagaccttatttccatgcaaggtcacattcacaggcactgggggttacaatggccacatcttttggtgggggtgggacacacaattcatcccataacagtcctgctttaattctggaaagcctgtatgaataataattgctctggaactccgtcggtgccagactaactattctaaggtcttgagactcatgaactcatttaagcctttctaggatacaggctccgtgatggtctattctacagacgatggaactggggcatggaggcgaaggctcttgcccatgttctcatggtaagcagataacagaagtaagatccaaacccagctgtggaaccaccatgcttaattgctgagatatagatggaagaagatggaaaggaaagggggaagggaagaaaggaacaagtaaagggtacacagagggtgaaaagggccgcagcaggggtggtggcagaccaagacacacacacacagctaatccatcagtcaatcagcaagcatttattgagcacttgttgtattctcagagctccacttggctgtggagagatagcccatgatttaagcccaagttcttacttctacagagctaacttgtgcagagctactggctagaagtgcagtcataaaggagcagtggaaggcattggtctgaactatcacattcattctggccatctggacattggacatgatgcttctgattgtcagacactcatgctccagctccaggatctcccgagggacctgcaggacaaatttcaccaccttcagctccttggacgccttcttctgaatgacgctatcaaaatcacagtctagctggtcactggtgattggccctgttaggacagccaaggtgaactcaaggccatgaagcgtgtggctgaagggagtgaagaacaggaaggccaggtggacatcagggccctagtagaccaacaggcccacagtgccctggaagctgaggctcatctatgccaagcagcaacttcgggcactatccttcgggtagtagagcctggggagaaaggaaagttagaagttaccactgtgctttgtaggcagtgttgcacactggataagattagaagacctggaagcctctacaggtcatacatgacttaggagaaagacattcatccattctttcattcattgagaagacctggagctccaccacctcctcctgtggagctcttgtgatctacttttaccacgtaaacgtttatttatccaacactacgcttattaagcatgtatcaggagctgggctaggaggtaactctttggcctacatcgaatgtcatgatacctgccagaattcacaagatctgatctctgtccatctctccaatcacatttcattccgtgcttcccctaccctgatccagcaataacagctttccttctgttcctcgaatagactgatatagtttggaaattcgtcccctccaaatctcatgttgaaatgtgatccccagtgttggaggtggggcccagagggagatgtttggatcatgggagtggatccttcatgaatgggttggtgccttccctgcggtaatgagtgagttcttgctctattagttcacttgagatctggttgttaaaaggaaactggtgctttcctcccttctctctctcttgctctctctcaccatgtaacacgccagccccccttccccttccaccaggattggatgctctctgaagccttcaccagaagtagatacaggcgccatgcttcttgcacagcctacagaaccatgagccaaataaacctctttcctttataaattaccgagcctcagatatgcctttatattagtacagaatgttatagacataggtaagacacagatcaaggtctttcccactccagacactttgcatttacttttcctttgcacagaattctgttccccaagacttcctcatggccaccccttctcagtattcagccccaggtgaaaggtctctccctcaggatgccttcccagacccccagaccctttcctaaaaagctttcactttactcctcagcacaccgcacgttcggtcgtctccatggcacttactctccatggccatcctgttgacttctttgtttacctgtttatgtcatgttgccccccgggaggaggtacattctacaagagcaagagcctcatctgacctgtatgcagccacggctgcaggacctgggcggactggatctagcaggcatccaggaaatgtttgtggaatcaatgaatgaaagaatgaacaccatggtgagcaaagtgatgtggttcctgaccccacactgctgcacaccttattatgaggagagagagtcaacaaataagcataaataagccctgagttctacaggtgagaaggtggggagtggacaggcacagaggaaaatcatgtgtagacacagggaggcaccatctgcaagccaaggagagaggtctcaggagaaaccacccctgttcacaccttgatcttggacttccagcctccagaactgtgagacaataagtgtcggttgtttaagccacctgatctgtggtacttttttctttgagacggaatctccctctgtcagcaggctggagtgcagtggcatgatctgggctcactgcaacctccaccttctgggttcaagcgattctcctgcctcagcctcccaagtaactgggactacaagtgtgcactaccatgcccatctaagttttgtatttttagtagaaatggggctt[131 bp omitted]caaactaatatacaacccctcattagaagacagatgagcagcaaataaccgccctgccccatgccaggcagggcttttggggaaactctctggggaacatagactggtccagaggcccagaatggctttctcttccctctaccttgcgaccctgaggtcattgacccaaactgctcctcagggtgctaattatctcacctagggaccaaccgcacaggagctagggtgggcctttgaaaaggtgactcagataaagctacttccctgctcaaaacttaacagcagcttcccaccatattcagaataatattccaactcttcccctggcttctgtcatctggttgtgtctgtgtctttgtggcaggttgaataatgtctcctaatgatgtccctatcctaatccctagagcctgtgagtatgtgactttttttttttttttttttgagacagggtctcgctctgtcatcgaagctggagtgcagtggtgtgatctgggctcactgcaacctctgctccccagggttcagcaatcctcctacctcagcctcctaaggagctgggaccacaggcatacaccaccatgccttgctatttttttgtacttttagtagagatggtgtcttgccatgttgcccaggctggtctgaactcctgagctcaagagatctgcctgccttagcctcccaaagtgctgggattacaggtgtgagccacggctcctggccagtacatgactttccatggcaaaagggactctgcagatgagattaatctaaggatcctgagatgaggagaggatcctgggtatctgggtgggcccagtggaatcccatggatctttccttataagagcaaggcgggaggtcagagcaaggaggagatgagatgatagaagcaagaggctgaaggaggggccatgagccaaggaatgcgggtggcccctagaagctgaaaaaggcaaggaacagcttctcccctggagcctccgcaggagttggccctgctaacgctttgggttttgctccataacactcgtttcagatttctgacttctagaactgtatgagtccattctcacactgcgataaagacactgcctgagactgggtaacgtataaacaaaagaagtttaactgactcacagttccatgtggctggggaggcctcaggaaacttatcaggttggcgcaaaagtagttgtggtttttgccattacttttagttgcaaaaccgcaattacttttgcaccaacctaatacagtcatggtggaagcagggcaccttcttcacagggtggcaggagagatgagagagagagatcgagagagagagagcaggggaaactgccacttaaaaaccatcagatctcgtgagaactccctcactctcacgagaacagcataagggaagccacccccaagatccaatcacctcccaccaggtccctctcttgacatgtggggattacaattcgagatgagatttgggtggggacacagagccaaaccatatcgatagagtaagttacctgtggagatatctgtggccttttatctgtggcttaggaacaaaaggaaagacagtttcttgcatgactcagcttaattaagctttcagcttaatttttttttttttttttttttttttagaggcaaggtcttgctctgtcgcccagcctggagtggggtggtaccatcatagctcactgcagcctcaaactcctgggctccggcaatcctcccacctcagcctcctgagtagctgagactataggcttgtgctaccacacccagctaatttttaaaattatttgtagagacttggtctcactatgttgcccaggcagatcttgaactcctgggctcaagcgatcctcctgtcttggcttcccaaagtgctgggattacagacatgagccacagtgcccagccacagcttaagtttttccttttggcatagtgaattggggtcctgagatttcattttcctttcacagagatatggtttggctctgtgtccccacccaaatctcatctcaaattgtaattcccatgtgttggggtaggggcctggtgagaggtgattgatgggagcgtacttcccccttgctgttcttgtgatagtgacggagttctcatgaaatccggttgtttgaaagtgtgtagcacttcccgctttgctctctctctctccttctctgccatggtaaagatgtgcttgctcccccttcaccttccaccatgattgtaagtttcctgaggcctcccacccatgcttcctgttaagccttcggaactgtgagtcaattaaacctcttttcttcatcaattacccagtctcaggtagttctttacagcagtgtgaaaacggaccaatatacacggagacaagcgtggaacaaattctccctcacagatcccagaaggaaccagcgctgctgataccatgaattcacacttccagcccccagcaccatgagaccatcaatttctgtgaagccacccagctagtggtattttgttacagcagccctagcaaacgaacacagcctgcttcactcttcagaaaaccattcactcctgaccctgttcatggtctgtcccctgctgagacgcaagctcaagtaggggagacactgcctatcttttttcacccatgcaaccctcctgcctgttgcagagaaagttctccaacagatacttactgaacgagcataggcatcagagcgactatggtctcccacctacccggccacgttcatcaactctctaaggatcttcttcttgttttccctgacattcttcttggctaatgccaagagtagcaccaccacatctagagtgtaggtgtcagcaagcttgaatgtgtcgtatgtgtcactccatgcctcaatatcacctgaagcataaccaaaccaacaaagaaaaggcatcatgagtttggacaattaattctgcagatttttgtctatttacatcagggcttggcaaactacagttgtggaccaaatccagtcggcccactactttggctttataaataaagttttattgacacatgaggtt[131 bp omitted]tgtaacctccacctcctagattcaagcgattctcctgcctcagcctcccaagtagctaggattacaggcgtgcatcaccacgcttggctaattttttgtattttttaatagagacggggtttcaccctgttgg[136 bp omitted]ggaaccatggctgatgcagcataggtaaccaataaatgttcgttaaatgaaggaagaaaacagacacaatttatccctaatgggagtctcatcgcaggagacacgattgacaagctaaaaggagcccactgtgggaagtggcacaatcaggccccggaggaccacccatcctggatgctaggccttccaagcagctgctcacctgagactggatgaggaatgtgggatgcccaggtggaaggggttggatattcaggtaggacaagaaggctgcagagagaggcagcaacatgcataaacatgcaagaccgagagaggcagcctggcatcctccaggcccaagggtggacaggatgactcactcaaccatcagatgttggagcgtaacaagatgtccccagggcacagcacagctccattcggcctggcctggtggtgatatggtttggctgtgtccccacccaaatctcatcttgaattgtagttcccataatccccaagtgtcgtgggaggtaattgaagcatggaagtggttaccctcatgctgttctcgtgacagtgagttgagttctcacgagacctgatggtatgtatttatttatttatttgagaaggagtcttgctctgtccccaggctggagtgcaggagcgcgatctcagctcactgcaacctccgcctcccaggttcaagcgattctcctgcctcagcctcctgagtagctgggattacaggcacgcaccaccaagcccagcaatttatttttttttgttgttgtatttttagtagagatggggtttcactgtgttagccaggatggtctcaatctcctgaccttgtgatccgcccgcctcagcctcccaaagtgctgggattacaggcatgagccaccgcgcccggctgatctgatgattttataagcatctggcaattgccctgctggcactcacttctccttcctgccgccttgtgaagaaggtgacttgcttggccttcgctttccaccatgactgtaagtttcctgaggcctctcaatccatgctgaactgtgagtcaattaaaccttcttcctttgtaaattacccagtctcaggtatgtttttattagcagtgtgagcatggactaatacaggtggcttctcacctgctcctcccctgcacctacctccacaggcatctatgttgaacaggggaaaatgcatcaccactggtccagtttctcctttcaggatgtagcagctggcgggggccttggaccacaaatccagctcagcctcttctacttggggaaaggggatcttgtggcggcggcagtagtcagtggtagcccggatggtctgagaaggaggcaataagaaatggttgcaagacctctccagaagacccctccagaagacccctggggcctggagacccaatgggacctcagctaacagcccagacacacaacagagcaagggtcagcttggacagggacaacatcttctgtaagggaaagagtaagcctctgccatcacccgcactccccagcccacctagagacaacattcgcgaggttagagagtaacctttggggctgggggctgcgggactcagagggcaaggaaaatggtgcctagatgaggctttgaatcccagctctgccacagaaagatgttggagacctcatctctacagtatatatatatatatatatatttcaattagccaggcatgggggcgtgcacctgtagccctagctactcaggaagctgagatgggaagatcatttgagcccaggagcccaacgagatatgtggtatgggtgcatctcatcacctctgcaaaggatctctgtaatagccacctcacaggggtatttggaagataaatgagatattctccatcatcactgtgtaacagaaatataatgtcaccgtgaaggtacttttcttttcttatttttgaggcagagtttcactcttgttgcccaggctggagtgcaatggcatgatctcagctcactgcaacctccgcctccctggtccaagcgattctcctgcctcccgagtagctgggattacagacatgctccaccacgcccggctaatttcatatatttagtagagacagggtttctccatgttggtcaggttggtgatcctcaggtgatccgctcgtctcagtctcccaaagtgctgggattacaggcatgagccaccgcgcccggccgtaaaggtacttttcaattgtctacttgctgcacttgaagaaagtaaaaagaagtaggagaaattaattttaaaaataaatattaaataaaggtgacaccatggggaaacttaatgagaagtagtttctcagttgtaacaagtttcatttattctctttcctgtggcctccttccgtgctgtcctgaaccagagcaaaaggacactgcatgtctcattactgtagcactgaggttactaaacttacataaaacacatctcagtctctgtgtcttagaaaggcatctgttaagtcctgcaagctgactgacaaaactaagcaaggagaattaagatcaatgcgggccaggcgtggtggctcatgtctgtaatcccagcactttgggaggcca[134 bp omitted]gagacaggagaatcgcttgaacccgggaggcagaggttgcagtgagcccagatagcgccattgcactccaacctgggtgacaagagcaagaaagaggctgggcat[142 bp omitted]gtggcacatgcctgtagtcctagctacttgggaggctgagacaggagaatcgcttgaacatgggaggcagaga[135 bp omitted]tctcacttctaagtgggagctgaatgatgagaacacatggacacacagaggagaacaacacacactggggcctagtgttgggtggagagcgggaggaaggagagggtcagcagaaataactaatgggtactaggcttaatactggggcgatgaaataatcggtacaacaaatccccaggacacaagtttacctatggaacaaacctgtacttgaacccctgaacttaaaagttaaaaaaagatcagtgtgtttgtgttttgcacacaaatgcagaagttgcataagcatatgacttcatagttgtgatctcaagaaaaagggcatttctcctttatcttgttcttgcagttaacgtaagaatattttaaatttctaagtttctgaagtgttagaggaagagatggcccagtagagatgtcggagtaatgtcttatccttttaacatgtggttatttttccttatgtactcaaaggtggcttctttattcagaggagtgatattacaactagaaaccactcattagcaaaaggagatgcagtctcaacaagtgtttcttcttcttcttcttcttcttcttcttttttttttttttttttttttttttgacagagtctcgctctgttgcccaggctggagtgcagtggcgggatcttggctcattgcaacctccgcctcccagattcaagcgattctcctgcctcagccccactagcagctgggattacaggcacgtgccaccatgcctggctaatttttgtatttttagtagagacagggtttcgccatgttggccaggctggtctcaaacacctgacctcaggtgatccacctgcctctacctcccaaagtgctgggattacaggtgtgagccaccgcacccggcttcttcttattttatattgagttgaatatttgagtctaacagttttctacatatacttatctttagagacaggatcttgctgtgtcgcccaggctggagtgcagtggtgcaatcatggctcactgcagcctcaagctcctagactcaggttatcccatctcaacctcctaagtagctgggactacagg[137 bp omitted]catggagcaatcccatctctactaaaaatacaaaaattagctgggtgtggtggcgcatgcctgtaatcctagctacttgtgaggctgaggcaggagaatcgcttgaacctggaaggtggaggttgtggcaagccgatatcgtgccattgcactccagcccgggcaacaagagcgaaactccgtctcaaaaaaaaaaaaaatttgtgtggagatggggtcttgctatgttgcccaggctggtctcaaattgctgatctcaagtgatcctcccaccttggcctcccaaagcactgagattacaggagtgagccaccgtacccagccacttttctacacataaaacagaaatatcatgaaggtgcttcatacctgtattacagaggaatttactgtcataagtaccttctaaagatttgacattcagctgggcacagtggctcatgcctataatcccagcactttggaaggctgaggtgggcggatcacctgaggtcaggagttcaagaccagcctggccaaaatggcaaaaccccgtctctactaaaaatacagaaattagccgggcatggtggcgggcgcctgtaatcccagctactcaggaggctgaggcaagagaatcacttgaacccgggaggcgaaggttgcagtgagccaagatcgcaccacagcacaccagcctgggcgacacagaagactccatctcaaaaaaaaaaaaaagatttgacattcaactatagtagctacatgttggttagtttccttataagccccatcatggaaagaattaaagatgaatttgagaaaaatgaaaaaaaacttagacaatcaggttctgttaaattgttacagatatgtcttgcttaaatttctgtttattggccgggcgtggtggctcacgcctgtaatccctgcactttgggaggc[134 bp omitted]gaggcaggagaattgcttgaacccaggaggt[134 bp omitted]catgcaatatgtcaaaagtgtgattgcctcgatgtgtaatcaattgtgatggtgaatattaggtgtcgacttgattgaagggtgcctggaaagctggtattgtttccggatgtgtctctgagggtgctgtcagaggagatgaacatttgagtcagtggactaggagaggaagactcacccacagtgtgggcggacaccctccaattggctgccagtgtgactagaacaaagcagacagaagaaggtgggagaagctggcttgctgggtcctctggctttcatctttctcctgtgctggatacttcctgcccttgaacatcacactccaggttttttggcctttggacccttagacttacaccagtggctcgccaggggctctacggcctttggctacagactgaaggctgcactgtgggcttccctactttttttttttttttttttttgagatggaattttgctcttgttcaccaggctggagtgcaatggcacaatcttggttcactgcaacctccgcctcctgggttcaagtgattctcctgcctcagcctcccgagtagctgggattacaggcacctgccaccacgcccagctaatttttttgtatttttagtagagacgggatttcaccaggttgaccaggctggtctcgaactcctgatcttctgatccacccgcctcggcctcccaaaatgctgagattacaggcgtgagccaccaggcctggctgggcttccctacttttgaggctttcggactcggactgagccactattggtttgtttcttcctcagctcgcagacggcctattgtaggactccaccttgtgatcctgaaactccctttcatctagacatagatcctattggttctgtccctctggagagccctgcctagtatgtcaatataccaattacgaataaggtctttgacatgcattttccatactcggtcattaaaatccgaggtgtattttatcttcatagcacacttcaacttgggccaggcacatttcaagtcctcaagtgccacatgtggccggcaaccactgtagtggacagcttaggtctctgaagtcgtctttgattgaagtttaacaaatgctgccggttttcttcctattactcttgctattctcatcatcaccagataagcattgttgttaatccagaacaccagctatggaccaggcatggtgcagagactctgcagatctcctgcgagccagatgatgtgattcccattttcaggatgagaaaactgaggttcagaggttaagcctatcgctcggggtcatgcagcagagatttggcagaaaaggactcccaagaccttgatatctcattccacctttatcatattgtcttgggatatttatttcagcagaaatcctaagaccagaaagcctgggtattcctgggccaagggtctagaaagatggtgacaagttggttctggatcatggtatggggaggaggatggatgttcctaattcatattacagaatgtaaactgatagaagtgtgtgaatataaatatatattacattacacataaatataatagatgatatgttttaccatgattattttatatatactactatgtattggtatgtatcatgtaatagatatagttatatattatgtaggtgtatatattttttaataaaatagctgggcagggcggcttgtgcctgtaatcctagccttgggtggtgggagaatcgcttgaggccaggagttcaagaccagcctgggcaacatagcaagaccctgtctctaaaacaatttagaaaactagcctggtgtggtggtgtgtgcctgcagtcccagctacttgggagggtgaggtgggaggatcgcttgagcccaggaggttgaggctgcagtgagctatgatcacaccataagacccagtctcgaaaggaggccatgaggggaggggaagggaggggaggaaaatgtttataaaccccacagtaagtggcagatactgtgctaagcacttcacatgtattaacaagtattaatttaatccacagaacaactcctggtggagccatcgttagcccaattttacagctgaggaaaccgacatgcacagaagttacgcacattggatcaggccacacagctggtaagtggcagagctgggatatgaaggcagggagaacggatcctagtggccactgggaaggtgcaatatgtactaagacaaatatacttgcatatgttctcactcagcaaacatttattgagggccactatttgcccaggaaacccagatgagcaggaagacacgcgctcggggctggagacgtgcacacccggggaaggaggtgcacaggtgaggagctaggctgttgcagttcaaactggtatgaatgggcaggcaggacgcagaagcggggagagtcatctgccaggaagaggggcccgggaaggtctgggatggctttggatcagaagttcgttggatgtggccgaccgcgggtgcttcgggagcgatgggtgagttgatttggctctctggacttcccagccagcacctccccattgcccgcttcccagcccgcgtcctcagttcctccgcaaagtcagcttcgccgcagcccacctcccacccaggaccggccccaaagcccttctcgattacctcgaaaggatctccggcactgaagtcgaaggagaggatgaggtgaacctcccgcgtcgggggcagcacgagtgggaagggagtgttgatggctaaaccagcatccaccaggtggaggtgcttccggctgctcattatcttgtcccggatgccacctgtggtgcccaggaagaaagaggatcagctgcttctggggactgaaagcaagacttggaaatggaaggcagagagggggatgggaaaatgatcgttgtcagtgtagacagcagttgtgaggttgccaactaggagctgacttctctctcttcccagattcatatgttgaagccctggctgggtgcggtgcctcacacctgaaatcccagcactttgggggctgaggcaggtggatcacttgaggtcaggagttcaagatcagcctggccaacacagtgaaaccctgtctctactaaaaatatcaaaattagccaggcgtggtggcgggtgcctgtaatcacagctacttgggaggctgaggcaggaggatcacttgaacccatgagccggaggttgcagtgagctgagatcgcgccactgcactccagcctgggtgacagagcgagactctatctcaaataaataaacaaataaacagacaaacacatgttgaagctcttacctccagtacctcagaatgtgactgtatttggagacagggtctttaaagaggtaattaaggtaaaatggggtttttggcgtgaagttccaaatgaagctgccttctcagcagcaatatgtgagagtgttgttaacccaatgtttctgagacaggtctcggtcagtgtagaaagtttattttgccaaggttaaggatgcacaaccgtgacacagcctcaggaggtcatgatgacatgtgcccaaggcggttggggcacagcttggtttagacattttaggaagacccgagatgtcaatatatgtaagatgaacactggttcggtctggaaaggtgggacaactcaaagcagggagggggcttccaggtcacaggtagataagaagtgaatggttgcattctttttttttgagaaggagtctcgttctgttgcccaggcgggagtgcagtggcgcaatctccactcactgcaacctccacctcctggcttcaagtgattctctgcctcagcctcccaagtagctgggattacaggcacccgccaccatgctgagctaatttttgtatttctagtagagacaaggtttccccatcttggcaaggctggtcttgaactcctgacctcgtgatctacccgcttctgcctcccaaagtgctggcattacaggcgtgagccacgggccggccaacattctttagagtttccattagcctttccaactggaggcaatcagatacgcatttatctcagtgagcagagggtgactttgaatagaatgggaggcaggtttgccctgggcagttcccagcttgacttttccctttaacttggtgattttggggtcccgagatttattttcctttcacagcgtaaaccaaaaataaaatgataagcccctcccccccacccccatccctcccgtccccccgccaacaccctccccaactcctacccccccacaacaccaccccaaccatctgaatgaacccttcctcttggccagggcaccccagagttaacctgaaaacctagttctggccgtgacaggaagggagggtcagacatgcctcacgatgccctcctccctttggggatttaaggaaagctgaccagcatttaatatccacccagagcttaagtctgacaagaatcatttacaatctattctctctgaagcttgctacctggagccttcatcagttactggaaaggggtcctgatccagaccccaagaaagggttcttggatctcatacaagaaagaattcagggtgagtccacagtgcaaagcgaaagcaagtctgttaagaaagcaaaggggtgaaagaatcgttactccacagagtagggtgttacggaaagtaagaggagaaatgcaaccacctcctccttttgttatatataggaaaacaacaacaacaaaaaaacatggggagatgtgctctgctacaag[139 bp omitted]atggtgaaatcctgtctctactaaaaacacaaaaattagccaggcgtggtggcacctgcctgtaatctcagctactcgggaggctgaggcaggagaatcgcttgaacccgggaggcggaggttgcagtaatctgagattgtgccactgcactctagcctgggcaacaaagagcaaaactctgtctcaaaaaaaaaaaaaaccaaaaaccataattactatattttacaagaacttatattattatttttaaagcaaaattaggaatgcgtctgttctcaagatatcaggatatcaggacattcctgggtctgagtctgtttagtaaacattatgaatctgttcccttaaccataaccatctagaggctaggaatgcctaacttcctggggatacagcccagcaaggctgagcctcatttttcctagccctcattcaagatagagtcactctggttccaatgcctctcacacatctgcatgataaaactttgaaacattccaatagaatgactagtgctcttctaagaagaggggattagaacagagacacacatggagcaaagaccatacgaggatatgagaaggtggctgtctgcaaatcacagagagagtcctcagaaagaactcaccccacagacaacttgattttggacttccagccttgagaactgtgagaaaataaatgtctgtcgtttaagtcacccagtctgtgggattttgtcacagcagcctgagcagactaagacagtacctctgggaatggttcctcttgctgatgaaaagagtcaaactctggaaaatatttgaagaggtttattctgagccaaatgtgagtgaccaatggcccgtgacacagtcctcaggagatcctgagaacatgtggcctaggtggttggggcacagcctaggtttatacattttagggagatatgagacatcaatcaaatatatctaagatataccttggttcggtccagaaaggtgagacgacttgaagtcatggaggggtagaggtgaggggtgaggaggggtcgggggggggcttccaggttataggtagatttaaagttttctgattgacggttgggcacagtggctcacacctgtgcacctataatcccagcactttgggaggccaaggtgggcagatcatttgaggttaggagtttgagaccagcctagccaatgtggtgaaaccctgtctctactaaaaatacaaaaatcagttgagcatggtgacatgtgcctgtaatcccagctactcaggaggctgaggtggtggttgcagtgagccaagattgtaccactgtactgcagcctgggtgacagagcgagactccatcgcaaaataaataaataaataaataaaaataattaataaataaatatatggaaaataaaataaaaatatctgattggctattggtttaaagagttattagcaatagaaaggaatgtctgggttatgacaaggggttgtggagaccaaagttttatcacgtatatgatgcctccaggtagcaggcttcagagagaacagaatgtaaatgtttcttatcagacttaaaatctgtgttgaggtggctcacgcctgtaatcccaacactttgggaggccaaggtgggtagatcacgaggtcaggagtttgagaccagcctgaccaacatggagaaaccctgtctctactaaaaatacaaaattagccaggcgtggtggcgcatgcctgtaatcccagctactcgggaggcaggagaatcgcttaaacccaggaggcggaggttgcggtgagctgagatcgcgccattgcactccagcctgggcaaaaagagcaaaactccatctcaaaaaaaaaaaaaaaaatttgtgttgacatgactgctagtcagcttttcctgaattccaaaagggaggagggtataaggaggcatgtccgacccccacttcccatcagggactgaacccatttttcaggttaactttggagtgccctggctgacaggagaggtctattcagatggttgggtggtggggggcttagaattttatttttggtttacactctcatatattgctactgagaaagcgacttcatccaaccccttcagggagaaatttgatgctaaaacactcatcgccatgatccagtgacttgatgcttgatggtgtattccgaggccataagacccggcagctgcatggcatggtgcgcagacacagctgaagtcctgtgtgccttgtaggaagcaccccaggagaggtgagcaggactgacatccagccagggttcccttcccaggccacacacagccctggccaggggggcacattttggaattcacccccctggaagatgcaccttttctcgatttgcacaagggcaacaggaccacaaacataaagatgttcacgatagtcttgtaacaaaagagtggggaaggccaggtgtggggtggctcacacctgtaatcccagcactttgggaggctgaggtgggaggatcgcttgagcccaggggttcaagatcagtctgggcaacatagtgagaccccatctctatgaaaaagaaaaagaaaaattagccaggcatggtgctgtgtgcctgtgttcccagctattcgggaggctgaaatgggaggattgcttgagctggggaggctgaggctgcagtgagccatgattgcaccactgcattcccacctgggcaacagagcaagacacacacacacacacacacacacacacacatacacatacatgagtggtgcagggattggcatggtcataggagaggatctccaccagctatgaacattggagcttatggagactattaaatggcctcagtgtgagttcccaggagtctgacatcaattccacctgaatgagagggtcagtcccctgaagggaaaacccatacaaatgtgtgttgttttttttttttttagatggtgtctcgctctgttgccaggctggagtgcagtgggatgatcgcggctcactgcaacctctgcctcctgggttcaaacgattctcctgcctcagcctcctgagtagctgggactacaggcacccgccaccctgtccggctaatttttgtatttttagtagggacagggttttaccatgttggccaagctagtcttgaactcctgacctcaagtgatccgcccgcctcagcctcccaaagtgctgggattacaggcatgagccactgcgcccagcccatacaagtgtttttgaagaccaggtcctaggactagctgacaagaaattagggttttttgcatttttgcaaaaccagagaaagccatcagtgaggcttttcacgatgactgggactcgcagcgaggccacacatttttcagtatggaccacaccactgagcgaaagttcccctaatcagatccctgggccctttgacaccacccccctccaaagctctggggaaggaccagcctgggattgtttcaggcccacccccttcccctactccagcccattcacacgcaaggacagaccagggcggtgggaagagggtcttctcaccgtgtttgtacaggaagttgtgagtggtcccccattcccactttgaagcgcaaatgcctgttttcttcacaaaatccatcaagttactgagtgagcctagggaaagaagccgagacagccaaggtgagttcaggagactgagtggtttctgcccccaccaaagtcatatgtggaagccctcatcccccatggggttgtatctggagacaggacttttaaagaggtcattcagggccggcgcgttggctcacgccagtcatcccagcactttgggaggccgaggcagaaggatcaccatatcaagagatcgagaccatcctggccaacatggtgaaaccctgtctctactaaaaatacaaaaattagctgggcgtggtggtggcgcatgcctgtagtcccagctactggggaggctgaggcaggagaatcgcttgaacctgggaggcagaggctgaagtgagccgagatcgtgccactgaactccagcctgatgacggagcgagactccatctcaaaaaaaaaaaaaaaaaaaaaagtgggggggtcattcaggataactgaggtcatgagagtgggatcctaattcaataggactggggtctttatgagaagagaaagagtgccaggcaccagagtaatcccaggacttagggaagccgaggtgggaggattgcttgagcccagaagtttgagaccagcttgggcaagagagcgagaccacatctttacaaaaataaaataaaataaacaaattagctgggcatattaatgcatgcctgtggtcccagctattcagaaggctgaggcaggaggatcacttgaacccagtagttcaaggctgaagtgaactatgtatgattgtgccactgcactccagcctgggcattccagcctcacttgtatcactcagatcatttagatacaagggagaccttgtatctaaaaaaaaaaaaaaaagaaaaaaaggaagacaccaagaataccaagaatgcgtgtgcactgaggaaaggctgggctgagaggatgcggtgagaaggcggccatccctctgcaagccatggagagaggcctcaggagaaactgaccccactggcaccttgatcttggacttcctgcctgcagaattgtaagaaaataaggctgggcacagtgactcacatctgtaattccagcactctgggaggcccaggtgggtgggtcacttgaggtcaggggttcgagaccagcctgggcaacatggtgaaaccccatctcaaaaaaaaaaaaaaaaacggtgaggaaataaaagcctatagttgaagccaccccacttcaacttttgttagggcagcagagctgacaaatctggtgagctgggaaaggttggcatacaggggcctgggggtcctggccgtcagatccagcatctatcattgagccacaggtgagatgactttgagccattggggttgggggagttggcaaggaaaagatggcgatttaatgactgtatgatcacctgtgtatctggggaaatgagcttgttctctttaggttcatgggggagaacgacgcagaatgttccaggagctgttccaaaatgcccagcacactttcccgtgctcccttccccagcccaagaggctgccaagtcagtcagggataaaccaggtcattatcccagacgcctgcctcttcctcaccctcaccctggactatcaccaagacctgccaattccacctcctcttcagtgtctctgctcctcccaatctcatctgccagtaccttatgcagcatcttttccatccaggatgcaacactgcctccccctctgatttccctcttcctggtttttcagctccaatcctttctctgaacagcaggggcagagtggcaagagagcaaagctagtagggaggtgggtgcttgagctagatgctgatttgaatttgacttcatcactcattagctgtgtgaccctgagcaagttacttttatttatttattttttcttgagacagtcttgctctgtcacccaggctgtagtgcagtggtgcaatctcggctcactgcaacctccgcctcctgcgctcaagtgattctcctgcctcagcctcccaaatagctaggaccacaggcacccaccactacgcccggctaaatatttttttgtatttgtagtagagacggggtttcgctatgttggtcaggctggtctcgaactcctgacctcaggtgattcacccacttcggcctcccaaagtgctaggattacaaacatgagccactgcaccgggcccctgagcaagttacttaacatctctgttctcatctgtaaaaccaggaagagagtaacacctatcccttatagatttatgaggaataagtaagagcctgcctatagcacttaggatgttgggaggatggtttaacatgtcaactaggctgggccacagtaaccagttatttaatcaaacactagcctagatgtggctgtgaaggtattttgtagatgtggttgacagctaaaatcagttgacttcaagaagattattctcagtaatgtgggtgggtctcatctactcagttgaaggctttgagggcaaaacagtttctagagaagaagaaattctacctccagactggagcgtcaaattctgcctcatgcatgcgtatgctcattgcagcactattcacaatagcaaagacatggaatcaaccaaatatacccatcaatggtagactggataaggaaaatgtggcacatatacaccatggaatactatgcagccagaaaaaggaacaagatcatgtcctttgcagggacagggatggagctggaagccattatcctcagcaaactaatgcaggaacagaaaaccaaacaccacatgttctcacttataagtggcagctgaatgatgagaatatatggacacagggaggggaacaacacacactggggcctgttgagggggcggtgggagggaaaacatcagggtaaacagctaatgcatgtggggcttaatatctaggtgatgggttgataagtgcagcaaaccaccatggcatacgtttacctgggtaacaaacctgcatgtcctgcacatgtatcctcaaactttaaattaaattaaattttaaaaaatcctgtctcggtttccgcctgttggcctgccccatggattttggacttgtcatcttcacaatcccatgagccaatttgttaaaataaatatctctagttagatagatagagatagatagctataaatacatagatatagatgcatagatttgggcagacagagacatagataggtagatatagatagatagatatcttattggctctgtttctctgaagaaacctaacacatccagcaaatagtaggcacttaataaatattaacttctacaagagtttagcagcagaaaagcaaatcacacctacattgctttgatagccctttaatatttaacatgttaaagaaaactaaatgtggcctgaggactccatacttcttctttttttttgagacagagtttcactcttgttgcccaggctggagtgcaatggcgtgatctcagctcactgcaacctccgcctcccgggttcaagcgattctcctgcctcagcctcccaagtagctaggattacaggcatgtgccaccacgcccggcgaattttgtatttttgcatttttagtagagacagagtttgccatgttggccaggctggtctcaagctcctgacctcaagcgatccgcccaccttggcctctcaaagtgctgggattaaagccatgagccaccacacccggccattctatcttatatttttatttatttattttagagaggaggtctcactacgttgcccaggcttgctggtcttgaactcctggcctcaagcgaccctcccgcctcagcctcctgagtagctgggactacaggcgtgagccatcacacctggcttttttaaatgttttatctatttattaattttgtttaaaaaagatgaggtctcacagtgttttccaggctagtcttgaatacctgggctcaagtatatcttatagtaagttaagaattggccgggcacagtggctcacatctgtaatcccagcactttgggagcctgaggtgggcggatcacaaggtcaggagttcaagaccagcctggccaatatgatgaaaccctgtctctactaaaattacaaaaattagccgggtgtggtggtgcatgcctgtggtcccagctactcgggaggctgaggcaggagaatcgcttgaacccgggaggcagaggttgcagtgagccaagattgcaccaccgcactccagcttgggtgacagagcgagactccatctcaaacaaacaaacaaaaacaaaaaacaaaacaaaaaaaagtacgttttttaaaagaaaactttttaagggatgggggtctcactctgagtgcagtggtgcattcatagctcactgcagcctccaactcctgggcttaaggaatcctcccacctcagcctccccgaatagctgggactacaggtgcacgcaccaccatggccggctaggatgcatgttctcatttcagcacaggagccaggcattatagaaagtcatagtgaggcttcgtgtggcacattccatctctctccattacccaccggaggggtaaacccaagcctctcatctgccagactgaagtcagtagatgaactctggctgactttccccacatttccacttggtaggctcattgtcactcattcttcaagttgcttctgagctatcaccttggaaaaggaggcttcttcattaatcccatctaaggggagcttggccaacaatagctcagagacatcaagttaatagtcggctccctctttaaattgtagacaaaggaaaccagagaatagactgatttcatccaacagagataaaaacaggaatttatgtaacatgaataaaaggaggaggaagggaaatctagagtctgaagagagtacaccttgatttcctttccttggtgagctgctgatgagctggtcaggaggactctgggtgtgtctgtgcctggacaccgggtcatcacagaggtgagaggttggatgtctgggggtgagactggctgtacctgggtcatctcaggaaggcagtggcttcagcgaccaactgtcttcattgtccctcatccacgctacttcactctcagaatttttcaccggatacctgctctcgcctctccttgtctctccatataatttacttatttattattttttcgagacagggtcttgctctgtcacccaggctggaatgcagtggcacaatcatagttcactacagcctcgacctcttgggctcaagtgatcctcctgcctcagcctcctgagtagctgggaccatgggaacgcactaccatgtccagctaattttttacaaaaaattttgtagagatggggtcttgctatgttgcccaagctggttttgaactcctgggctcaagtgatcttcctgcctcagcctcccaaagtgctgggattacaggtgtgagccactgcacccagccctctccatagaaattagcccagtcggggatggacttgcctgtggttggcttacctgtctattctccatctcgtcctctagaccatgagtcctccaggcaggcacttggtctgacatttcccctttgtcacccctacccccagcctgctagtaggagagttattatttcatgctaatgactcaagacatcctagatggatggatggccggttgggtggatagagggtgggcgtatcagtccattcttgcattactataaagaagtacctgaggttggataatttataaagaaaagaggtttaattgtctcacagttctggatgctgtacaggaagcgtggtgctggcatctgcttctggtggggcctcaggaagcttccaatcatgatggaaagtgaatggggagcaggcacatcacttgccgagagcaggagcaagagagcgagggggaaggtgccacacacttctaaacaaccgtatctcacatgaactcagagcaagcacttactaatcaccaagaggatgacgctaagccattcatgagggatccgcccccatgatccaatcacctcccaccaggccccacctccaacactggggattacatttctttttcttttaatttaatttaatttaatttaattttaagttccgggacacatgtgcaggacgtgtagatttgttacacaggtaaacatgtgccatggcggtttgctgcacctatcaacccatcacataggtattaagccccacatgcattagctaattttcctggtgctcttcttctccccacccgcccccaacaggccccagtgtgtgttgttcccctccctgcgtccatgtgttctcatcattcagctcccacttataagtgagaacatgtggtgtttggttttctgttcctgcaatagtttgctgaggataatgacttccagctccacccatatccctgcagaggacatgatcttgttcctttttctggctgcatagtattccatggtgtatatgtaccacattttctttatccagtctatcactgatgggcatttgggttgattccatgtctttgatattgtgaatagtgctgcagtgaacatacatgtgcctgtatctttctaacagaatgatttacattcctttgggcatatacccagtaatgggattgctgggccaaatagtatttctggatctagatccttgaggaattccacactgtctcctacaatggttgaactaatttacattgggggattacattccaacatgagatgtggaagggaacaaatatccaaactgtaccagtgggacatctggtcatgtcccctgcaggactggcccacaggggtggggaagagcaagaggggggagaaggttggtggcacttactgttgatgacacttatcacactacacatggtacctttcctttcggggtcctcatggggctgctcctgcttttccagggaggtcctggtccaattctcgagcatctcagtcagccaggtgtgttcaggctcaccgccttcatctacgtcaagaaatccaggtggtctcagacactgtccaagtaccctaccaagaacatcacagaccctgctctgcctcatcttctgcaatgccctgcggttcctcctgaggtgacctccttctccaggtgaccctctctccccttgccttctgctgacccccatgttacctcactctctctgactttctggcctcttttttctagctccttcatctctgcctccacctctactcatcttttgcacgcttattttcttcagggttggaggcaaagtctcccatttatttatttatttatttatttatttatttatttatttatttatttgagacagagtattgctctgttgcccaggctggagtgcaatggggcaatctcagctcactgcaacctctgcctcccagtttcaagaaattcccctggctcagcctctggagtatctgggactacaggcacgcaccaccaccaggcccggctaatttttgtatttttagtactgatggggttttaccatgttggccaggctggtctcgaactcctgacctcaagtgatccacccccctcagcctcccaaagtgctgggattacaggcattgagctatcatgcctggcatcccctcttatttttatccacactcatgaattagatgatgttcaactctctctctctcacacacacacactgataatagctctgctcacgtttgctgagaacgtcacctgccaggctcatcttggcattttgcataaattctacacttcaaccttcaccgcattccttggagtgagctctctgaggcttcttttataagggattaatccaaatcaagagggctccaccctcatggtctcaacacctcccaaaggccccatctcttaataccatcaccttggggttgccatttcttttttgttgttgttgttgttgagacaggttgtcgctctgtcaccaggctggagtgcagtggtacaatcaccagcctaccatcccacaacattagttagccatttgcaggttggagatagattctccttccagacttgtctataaccagcatatggtgaatgctgatgtcaaaaaacaacattaaagcccgccatgtggcaagaagttggctctctgcaacccagaagagggttccccagaatccaaccctactggtactctgatcttgggcttccagcctccagaactgagaaattaatctctgttgttgctaagccagccagcctatgtatggcactttgttctggcagccttcacaactaaaacagggagggaggcatgaagtggatgaagggctgtgctcaggacctaccttcactctgtacctgactgttgacctgtgaaaaagccacacttgcatcttccacaactggaaggaagaccatctttgtcagcctctgctgtagttaggttggggccatgtgactgatcctggccaacaggaggtgtgtggagctggtgcccaatacttccaggcctggctacaaaaggccttctgtggcactccagctctctcctctcatggaacagacaaggagaccttgtgccaagaggagaagcaacgagatgcaagcagcttggcccagcgcggtggctcacacctgtaatcccagcactttgggaggcccaggcaggcagatcacttgaggtcaggagttcgagagtagcctgggtaatgtagtgaaaactcgtctctactaaaaatacaaaaattagccaggtgtggtggcagttgcctgtaatcccagctattcaggagtctggggcaggagaatagcttgaacctggaaggcagaggttgcagtgagctgagattatgccactgcactctagcctgggtgacacggctagactctgtctccaaaaaaaaaaaagaaaaaagaaaaggaaaggaaaaaaaagacgcaaacagcttggatgcctaagtccccacatggagccaagttgccctggaggaacactcaacccatatcgctttttgggtaagcaaaatataaaccctttgtgtcttaagctatagcaatttgtggtttctttgcgcagcatagcctctcctgaacaaatatagtctcctccataatataatctaacttctccatacagaattcatctgatactttgttcttgttctccgtactcccaccatgggtcaagtctgattccttcatgactcccaacctatgtagttttgggaagtatttttcctctcaatttgctaattgcctcaggctgttcccattttctgcctctgacacttggatcctaggcatacctagggtatatctgacgactatgtacatggatcctatggttagactcatccaaaaagctcctaggtctaatgaatgaattcagtagagtttcaggatacaaaatcaatgtacacaaatcagtagcactgctatacaccaacaatgaccaagctgagattcaaatcaagaactcaaccccttttacaacagctgcaaaaaaataaaataaagtactcaggaatatacctaaccaaggaggtgaaagactgctacaaggaaaactacaaaacactgctgaaagaaatcatagatgacacaaacaaatggaaacacatcccatgctcatggatgggtagaatcaatattgtgaaaatgaccatactgccaaaagcaatctacaagtccagtgtaattcctatcaaaatactatcatttttcacagagtgtcagtttgaactccgatcctgcccctcctggctgcgtggcctcaggcacctgggagagtccatgctcctctccattcccaaaggagcaccacatgaatcagacacgtaaagtttttaggacaatggctggcttcaagccagtgtgcagtccacactatcattagggattcatggcaaagtaggatgcttaccttctgggggaggatgttccccttgtgaactttcttgcagcctcagtaatcgggctgcaaaagagcagaggcagggggaatgtttaactgtaaagtcactagttatagaaaatacagattacctgcagcgacgtctctttaatagaaatggcagccatgggttggagtctgttgatacgggttctggagagctaattttgtacccgtcttccaactctgtgctcgctgacctcatgttggtagcttgaaatttgccatgatgtgatcaagtgggtttcatactaggaatgcagggatggcttaacatatgcaagtcaacaaatgtgatatatcacagaaacagaattaaaaacaaaaatcataggagatgcagaagcatttcacaaaatcccacatccctttatgattaaagccctcaacaaaatcggtatacaagagacatacttcaatgtaataaaagccatctatgacaaacccacagccaacattacactgaacagggaaaagtttaaagcattccccctgagaactgcaataagacaagaatgcccactcttatcacttgtattcaacatagtactggaagtcctagccacagccatcagacaagagaaagaaatgaagggtatccaaaccagtaaagaggaagtcaaactgttagtgttcactgatgatatgattgtacacctagaaaaccctaaagactcatccaaaaagctcctaggtctgatgaatgaattcagtagagtttcaggatacaaaatcaatgtacacaaacagtagcactgctatacaccaacaatgaccaagctgagattcaaatcaagaactcaaccccttttacaacagctgcaaaaaaataaaataaaatactcaggaatatacctaaccaaggaggtgaaagactgctacaaggaaaactacaaaacactgctgaaagaaatcatagatgacacaaacaaatggaaacacatcccatgctcatggatgggtagaatcaatattgtgaaaatgaccatactgccaaaagcaatctacaagtccagtgtaattcccatcaaaatactatcatttttcacagaacaaaaaatcctaaaatccttttttttttttttttgagacttagtctcgctctgttgcccaggctggagtgcaatggccaattttggctcactgcaacctctgcttcccaagttcaagcgattctcctgtctcagcctcccaagtagctgggattacaggcgcatgcaccatgcctggctaatttttgtatttgtagtagagatggggtttcgccatgttggccaggctggtctcaaactcctgacctcaggtgatccacccgccttggcctcccaaagtgctgggattacagacgtgagctaccatgcccagccacaatcccaaaatccatatgaaccaaaaaagagccctcatagccaaagcaaagactaagcaaaaagaacaaatctggaggcatcacattacccaatcaaattatactacaagcctatagttaccaaaacagcacggtactggtataaaattaggcatgtagaacaatggaacagaatagagagcccagaaataaagccaaatacttatagccaagtgatcttcgacaaagcaaacaaaaacataaagtgggggaaaggacaccttattcaacaaatggtgctgggataactggcaagccacatgtaggagaatgaaactcgatccttatttctcaccttatacaaaaatcaactcacaaattcaatgtgaatttgcatcaaagacttaaatataagaccagaaaccataaaaattctagaagataacatcaaaaaaactcttctagatgttggcttaggcaacgagttcatgaccaagagcccaaaagcaaatgcaacaaaaacaaaaataaacatatggatatatgggaacgatggctcacgcctgtaatcctggcactctgggaggcccagctgggcggatcttcaggtcaggagttccagaccaacatgacgaaaccccatctctattaaaaatacaaaaattggccaggtatggtgttggatgcctgtaatcccagctactcaggaggctgaggcaggagaattgcttgagtctgggaggcggagattgcagtgagccgagatcgtgctgctgcactgaagcctgggtgatggagtgagactccgtctcaaaaataaacaaatatatgggacctgagtaaattaaaaagcttctgtacagcaaaggaagtaattatcagagtaaacacacaacccactgaatgcgagcaaatatttgcaaactaggcatccacaaaagacgattatacagaacctataaggaactcaaagaaatcagcaagaaaacgaataatcccaccgaaaagcatcccaatgatatgaatagacatttctcaaaagaagatattccagtggccaagaaacatatgaaaaaaatggtcagcatcactaatcattaaagaaacgcaaatgaaagccacaatgagataccatcttactcccacaagaatggccattgataaaaattcaaaaaaaaccatagacgttggtgtggatgcggtgcaaatggaacactcacacactgctggtgggaatgtaaattagtacaacctctatggaaaacagtatggagagtcctcagagaactaaaagtagatctaccgttcgatccagcaatcccactactgggtatctacccaaaggaaaggcagccattatatgaaaaagacacttgtgggctgggtgcagtggctcacgcctgtaatcccaacactttgggaggctgaggaggggagatcactcgaggtcaggcgttcaagaccagcctggccaacatggtgaaaccccatctctactaaaaatacaaaaattagctggatgcggtggtgcacatctgtagtcccagctacttgggaggctgaggcaggagaatcacttgaacccacgagttggaggttgcagtgagattgcaccactgcattccagcctgggcaacagagcgagactctgcctcaaaaaaaaaaaaaaaagacacatgcacatgtatgtttatagcagcacaattcacaattgaaagatatggaaccagccgagcatggtggctcatgcctgtaatcccagcactttgggaggctgaggcgggtggatcatgaggtcaggagatcgagactatcctggctaacaccggtctctactaaaaatacaaaaaaaaaaaaaaaaaaaaaattagctgggcgcagtggtgggtgcctgtagtcccagctactcaggaggctgggccaggagaatggcgtgaacctgggaggcggagcttgcggtgagccgagatcgcgccactgcactccagcttgggtgacagagtgagactgtctcaaaaaaaaaaaaagatatgaacccacctaagtgcccattgacaaatgagtggatacagaatatgtggtatataaacaccatggaatatgactcagccataaaaaagaataaaataatgtcttttgcagaaacttggatggaggccatcattctaagtaaagtaactcaggaatgtaaaaccaaaaaccatatgttctcacttataagtgggagctaagctatgggtacgcaaaggcatacagagtggcataacggacttcagagattcagaaagaggagggtagggaggtggggataaaaaactacacattggggccaggagtggtgggtcatgcctgtaatcccggcactttgggaggccgaggcaggtggatcacctgaggtcaggagttcgagaccagtctgagcaacatggagaaaccctgtctgtactaaaaaaatacaaaattagccaggcatggtggtgcatgcctgtaatcccagctactcgggaggttgaggcaggagaatggcttgaacccaggaggtggaggttgcggtgagcagagatcgctccattgcactccagcctgggcaacaagagtgaaattccgtctcaaaaaacaagaacaaaaacaaaaaaacactacacattggggccaggtgtggtggctcatgcctgtaatcccagcactttgggaggctgaggcgggcagattgcttgagctcagaagttcgagaccagcctgaccaacatggcaaaacctcatctctactaaaaatataaaaattagccgggcatggtggtacgtgcctgtaattccacctactagggaggctgaggcaggagaagcacttgaacccaggatacagaggttgcagtgagacgagatcttgctactgcactccagcctgggcaacagagtgagactgtcacaaaaaacaaaaccaaaaaactacatattgaatgcaacatactctaaaacatacactgatgggtggactacagtctcagaatttactactacataattcatcgtgtaacagaaaccacttgtaccccaaaagctattgaagtaaaaattcaaaaaaaaacaaaaaaatcttaatatttaaaaatattattacctaatagtagcagtgttgatccttataattaaaatattgtacatgttataactttttacttgagaccaaatcaaaattcaatttttccacatgtgctgaaaatgcgatagaaagctaagtcctgatacacgtcggttaggtcaagcttctgcttcatctttttcaaatttttgaattgtcaataaataaattttgtctgcttttttttctttttctttctttctttcttttttttttttttttttttgagacacagtctcgatctgttgcccagcctggagtatagtggtgcgatctcggctcactgcaacccctgcctcccgggttcgagcaattcccctgcttcagcctcccgagtagctggggttacaggcgcccgccaccatgcccagttaatttttatatttttagtagaaacgaggtttcaccatgt[222 bp omitted]tgcctcagcctcccgagtagctgggactacaggcgcccgccactacgcccggctaattttttgtattttttagtagagacggagtttcaccatgttagc[133 bp omitted]tattgacatttaagaggacactcccatgtgtcaagctttgctctaagtactttacatacatgaggtcatttaaaccccacatcaaatagtacatagtcccaatcttgtatatttgatgtatatttacatttatttgatataaatatacaagattggggctatgcactattgtatccattttacaaaggagaaattgggtcacagagaattttgttgttgttgttgattttcttttctttttttttttttttttgtttgtttcatttcttttttttctttttctttttcttttttctttttttttttttgagactgtgtttcactcttgttgcccaggctggagtgcaatggtgtgatctcagctcactgcaacctccacctcctgggttcaagcgattctcctgcctcagcttcccgtgtagctgggattacaggcatgtaccaccacgcccggctaattttgtatttttagtagagatggggtttctccacgttggtcaggctggtctcaaactcctgacctcaggtgatctgcccacctcagcctcccaaagtgctgagattacaggtgtgagccactgcgcccggcccctcatttctttattttttaatttttttcacagagaatttaagcagctttctagggtcactaacgcatgagaggtggagctgggatgtggattcaggcagacaggctttggatcagaaccaccatacgattcccctatagatccctgtgtctgcactcaccaaccagttacataggtgagtcacgcatcctttccatgacccggtggctctcagcaaaatggaggggacaacagcatccacttcttcaggtcattcaaagggttaaatgatgaacaggtaacgaatgccaattttgtgtgtgtgtgtgtgtgtgtgtgtgtgtgtgtgtgtgtgatggagtcttgctctgttgcccagactggactgtagtggtgtgatcttagctcactgcagcctttgcctcctggtttcaagcgattcttgtgcctcaacctcctgagtagctgggatcacaggcgtgcaccaccatacttggctaatttttgtatttttagtagagacgcattttcaccatgttacccagcttgcactcgaacccctgacctcaagtgatctgtccgcctgggcctcccaaagtgctgggattacaggcatgagccactgcgccgggccaggctgcttgcatcttgttgcccaggctggagtgcaatggtgtgatctcagctcactgcaacctccgcctcctgggtttaagagcttctcctcttggcacaaggtctccttgtctgttccatgagaggagagagctggagagccacagaaggccttttgtagccaggcctggaagtagcaggcaccagctccacacacctgttggccaggatcagaaacctgaactcctggcctcaaatgatccgcccgccttagcctcccaagtgttgcgattacgggtgtcagccactgcatccagccagattgctaatgtttactgagtgcctttatctaccagacactgtcctatgtgcttttgatgaattaactcatttaatcctcataactactattattatcacccacatggcacagaggcagaaactgaggcacagagaggttaggtaacttttcagaggtcacaaagctcacatgtaccacagcaacattccttccaagggtgtctgtactctcatccactctgtggtcttcctggctgcccataatcaatgttcagtgtatgagaataaatgtcaggaaatgtggttgttagaaccattatacacaggcctcttttctgccacatgcaggaaaagtactgtgaatctccttgcataaaatatctctaggctttgacctttctgttccccaaatactcaccaaaaataaggtgtccaatgcttttagcattagcaacagcccttctccataaacctgccaagaaaatagcaataaaattcaaacattctccatcacatgactgtcatgtttgatattcaaagcaccagcagactggcataaagcactgcagggatctgcagcaggaagaaagatcattcttccattccataaatatttatgaagcaatcagtgggcacccggcactcttctgactgttggaatagagcagtaaacaagacagatttgtcctcaggaaccttctatgggtggagccagccgggcactgtagactggctaccccaaggccatttcaagctcccttccatgccaacgtttctcagcccacaggcaggaagggcaaatatttcccagcctcccttgcagctagagggaggtcaagctctggcccatgcagatttatgggggcacttctggaaagtcctagctgtcctactatgaaagagcaggacagcaaacatgttggattagaggcattgctggcatacccctcccacttggaaggacaaaacactgtgtagagattcacactgtgaacttttttttcaagaagtgattcaggaattagacaggaaatctgaaggaatccacagtccctttgaaggaagtgacgggctgcagcctatactgtgactcaagtgaagggctgcgagtccccagggtgtgagatggggaaagactgtttgcaggacacacgcccccaccacaccagggagcctgaaagtccagtctctggggtaaggccttaaccctattcagtgcaggatatgacttggggaggttcgtggaatataagtaggagctgtgggaagaaccctgcatgcactcccagatcccagtatggacccagggaagccattccttattgttcctcacagggcaccctgcagtggtcagccaaaaagttcaggtgggtggtcgcaggttgaaagaagcccccagctgggtttcatgagataactgtgggtggaggtgaacttctccacccacatggggtgaatgaaaagcaagctgcagacacgtgtgcaggaccctggcacatggctaggtgggatagatggggaggggcatggcctgagagcagtggttgctatctctgcagggaaagcttatgacttgggggcatttgcaagttctgagcacaggctgcctggaacttagctcaccactgccagtggaacagggtgggaggggatctgcctcgccaagtgtgtgggatccgcgtggggcttactgccacctgccactccccactccctacacaaactcttctgtgcagcagaggcagaaacattcctctctggattatcagcacatgggtctgaaaaccacccccaccccctgatacccacaggagctgctgcttgccctgcacagggagagttagagcacaaaactgcctgacccagcccacacctggctttgccctgccacccgccctggtggctttaatacaaaggacggaaacttttgggaactctgtggctctgcccattgcctgagaaacaagagtagccaccctgggcaacatagggcaagtgaatatcccactgctactactgcagctggtgctccacctgctgggtggaggccaaccaacacagtccatgacagcatctcctggtaggataacactgggcccaggaaggagaaaatggctctatgtcctcagctatcaccactgcatgcaccactctggctaaccaggaggtcctgagtctgtccacatgatcagttcattactactataactagcattcaaggaagccaacctactaaggctgtccatcagcaaggaatctcacagagcctgtgtctctctcctgccacccccattagagctggtgctgcttcccattgctgggagtctcgaggacaggggacattaccggattccttggagacattcccaagaaccagcctgaagtgtggcagcttcactgggtggctagacccagaggaacaataacactcactgtagtctggtgctcagtgactcctatcctaggggaatggggagtgcaccacatcaagggaacaccccatgggacaaaagaatctggacagcaggacttgaaaatcagatctttctgctggtgggaagtttctttcagcagggacacagtttcagtgctgggctcagcacggaaagcccacagctctaacccaaccatcagacagccctggtgtgcatgaagggtcttggataaggggatgtctttcccctctcttccactgccacaggcacagttggggtttctcccatgggagctcagcatgggtacaactatagacagcctttctggaacatatcagggcgactgcatccccacaggaggagcccctctaggtttaggcttgcataagagacagattcacagttcctctctactcagaacaccaacattcctacagatgaaaagaggtgcccgtctgatctgaatagctggagcactggatcacgagtgtgtctgagagatggatggctttctggctgacctggcaggggagctgaggtggctccaacccttctgcctgataagaccacggtgcacagccaggcatggtggctcacggctgtaatcccagcactttgggaggccgaggtgggcggatcacctgaggttgggagatcgagaccagcctgaccaacacggagaaaccccatctctactaaaaatacaaaattagctgggcatggtggcaagtgcctgcaatcccagctactcaggaggctgcggcaggagaattccttgaacctgggaggcggaggttgtggggtgagctgagatcatgccattgtattccagcctgggcaacaagagccaaactctgtctcaaaaaaaaaaaaaaaaaatctcgatgcaactcactgagagctcctccagccacctctgtcaaggctgggacctttgctcaccattgggtgttgcatttactcacatgttttggccacaatcacttcctatgcactcccctacagacctgaagcctgaaccatcaaaccagtcaataaaatactggggaaaaaattgcatgccttgtggggaatgagttaagcttcaagagtcttctaccattccagccctgtaggcaacagtgaacttgctcacacagtgagcacatcgcttctacaaccagcatatgagaaagccatcacacgaagactccctatatccaaggaactcttacaatcttcacccctgaaagcaccaaggaccaaattaggctataattagctagggacattaaagtcacatccttaagcggaaaaaagaaaaaaaaaacacagtcaaatccaacataaattcaagaataattaaaagaaatagtctactcaaatgagaaggaatcagaaaagtaactttggtaatatgacaaaacatggttctacagcacccccaaaagatcacactacctctccagcaacagatccaaatcaagatgaaatctttgaaataccagataaagaattcaaatgggcaccaaatgaatcatacatgtaatgttcctaggacaatggctggcctcaagcaagtgtgcggtccccattatcatcagggattcatgatgaagtaggatgcttacctttcagggtcagattccttaactggtctgcaaaagagtagaagcaggaggaatgtttatctgtacaacaaagtccctagttataatataaaaaatacagatgacctgcagggatatttcattaatagaaatggcagccatgggctccaatggcagccaatggctctcgagagccaattttgcacctctcttccaactctgtgctcagtgacctcatgttggtagcctgaagttggccacggtgggaacatttacaccacaggaattggcaaacactacatatcaggaattttgtttttgttttttagagagaaagcttagcagacccactggagaagtaacactcagacccatctcacacctttagttagccatttggaggttggatatagatagattccctttttagttttgtttttaaccaagctatggtgaacaccaatgtcaaagaacaacatcagcccgggcgtggtggtttatgcctgtaatcctagcacactgggaggctgaggcagtgaatcacttgaggtcaggagttcaagaccagcctggccaacatggtgaaatcctgtctctaccaaaaatacaaaaattagccaggcacggtggtgcgcgcctgtagtcccagttactcgggaggagagttgcttaagcctgggaggtggaggttgcagtgaactgagatcataccactgcactccagcctgggcaacagagcaaaactctgtctcaaaaaaacaaacaacaaaaaaagtcaaagtgtaagaactaggacagtgcctggcacacaggaggtcccatgaatatacattaaatgaatgacgagtggtttagggtgtgaactcagtaatgatcctaaaaataagattaacatgtaatgaaacactcccatgtgtcaggcttggctctaagcattttacatacatgaggtcatttaaaccccacatcaaatatacgagactgcgactacgtactattgtctccattttaggaaggggaaattgggtcacagagaatttaagcagctttccagagtgagcagtgcaggagaagcagagccgggatgtggatccaggcagacaggctttggatcagaaccaccacactattcccctagagatccaccacccagttctcctatagatccccgcgtctgcactcactgaccagcagtgtgggtgagtcacgcatccttcccacgacttggtggatctcagcaaaatggaagggacaaaagcgtctgcctcttagggtattaaaggggttaaatgttaaatgagggaccaggtaatgattgctaatgtttactgagtgccgttatctaccaggcactgtcctacaagctttcaatgaattaactcatcaaatattcataactactgttattatcacccgcatggcacagaggcagaaaccgaggcacagagaggttaagtaacttttcggaggtcacaaagcttacatgtaccagagcaacattccttccaagggagtctgtactctcatccactctgtggtcatcctggctgcccaattatatgagaataaatgtcaggaaaagcagttgctagaacaattacacacaggtctctcttctgccatgagtaggaaaagtactgtgaatctccttgcataaaatatctctagggtttgacctttctgttccccaaatactcaccaaaaatgtattccctaatgacttcagtgttaccaagagcacttccccataaacctgccaagaaaagagcaataaaattcaaacattctccatcacgtgactgtcatgtttgatattcaaagcaccagcagactggcataaagcactgcagggatctgcagcaggaagaaagatctttcttccattccataaatatttatgaagcaattagtgggcacccggcactcttctggctgttggaatagagcagtaaacaagacagataaagtccttgtcctcacgaaccttctatgggtggagccagccgggcactgtagactggctaccccaaggccatttcaagctcctgtccatgccaacccttctcagcacacaggcaggaagggcaaatatttcccagcctcccttgcagctaggggacggtcaagctctggtccatgcacactgctggggggacttctgcaaagtgcttgttctccttctcagaaggagcaggccaggtatggtggcatgcaactctagtctcagctacttgggaggctgaggcaggaagatcacttgaggccaggagttcaagacctgtattgggctatgactgtgcttttgcacggcagcttgagtgacagagagagaccctgacttcaaaaaaaaaaaaaaaagttgcagcttcattggatgcagccgccatcccgtggtgtggaggagttcagcatgagggtgacttaatatgctaaggatggaggagcagaaaatctagaataaacctgggtccttctgcttaatgttgcacagctaaaccaatgtcaccagccacctaactttgtattatttatttattttgagatgggatctcgctctgttgcccaggctggagtgcagtggtgtgatctcggctcactgcaacctctgcctcccagattcaagtgattctcctgcttcagcctcccgactagctgggattacaggcatgcaccaccacgccctgctaatttttgtattttttaagtagagacggggtttcaccatgttggcccgtctggtcttgaactcttgacctcaagtgatctgcccgcctcggcctcccacagtgctgggatttcagctgtgagtcacggtgctcagtctgtctttttcttttgtaagaaaattaatcccacatgtcctcggggcactgtggttggttagtgacttttagccaaacacatttgtatatgatacagggagacataaaaaatgaataatcagccaggcacggtggctcacgcctgtaatgctaacactttgggagactgaggtgggcggatcaattgaagtcaggagtttaaagtcagcctggctaacatggtgaaaccctatctctactaaaaaatacaaaaattagccaggcctggtggtatgcacctatagtcccagctacttgggaggctgaggcaggggaataacttgaacctgggaggttgcagtgagcagagatcacacaactgcactccagcctgggagacagagtgagactccatctcaaaaaaaaaaaaaaaaaaaaaaaaaatagacacacccattaggatggctggtatccaaaaaaccccagaaaacaataagtgttgatgaggacgtggagaaattggaaacctgggacaccattgggcagaatataaaatggtacagccactgtggaaaatggtatggtcgttcctcaaaaaaaaaattttttttttttttgagatagcccaggctggagcgcaatggcgcgatctccgctcactgcagcttccgcctctcgagatcaagagattctcctgcctcagcctcctgagtaactggaattacaggcatgcaccaccatgcccggctaattttgtattttttgtaga[144 bp omitted]catgatccagcaattctacctctgagtatatacccaaaagaattgaaagcagggtctcaaagagatattcatagacccatgtgcatggcaggttccttcacaacagccaaaaggtgaaagcaatccatgtgtccatcgatggatgaattgataagcaaaatgtggtatattcgtacaatggaatatgattcagccataaaaagaaaggaaattcagacacatggtacaacatggatgaacttcgaagtcattttcctcagtgaaatcagacagacacaaaaagacaagcactgcatgattccatttacatgtcatactcagagtagtcaaaatcgtagaggcagaaggtagcattgtggttgtcaggggctaagggagggggtgacagggacttagtattcaatgggcgtagagttccagttttacaagatgaaaagtgttatggagatggatggcagtgatggttgcacaacattatgaatgtattgtatttataccactgtacttgacactttaaaatggttaaaatggcaaattttatgttatgtttattttataataataaataaaaagcaccctggtgtgtgaggggagggataaaatacacgtacagaatcccttcagtaggtgatacatacatctaaggaaataataatgttatagggagtacctgggagtgacaatttcaaaatctctgatgcccaagaccagatttagcaaagagatggtggggataggagacaggagccaggcttggcaatgtgaaggaccccgtctgtccagaccagagaaaaggggaagatccccttcatcctaccttgttctcctcccctgagaacacccctccatctaccaggttgcagaagctggaacctttgatgtcatctctgattctccttactctccacatccaatccaggtgtaattcttcttcatccatctccaggtttccagagtccatccacttccctcccatatccattctggtacccaaccttaaactgccattatctgtcaccaggaccattagcttctcaactgctcccaacttctaagtttacacacccacccctaatccatgctcagagagagagagagagagtgagatgttttaccatataaactgaatcggtcaccaccctaattaaactgcctccctggctctcctatcgcacttggaatccaaactaaacttcatctgtgtccttcagggtcccatatgatctggaccctgcctacctctctagccctctctctcagcctcattcaggaggctccagcctcactggtcttctcattggttctagagtaagacaaacttggtcctggcttagggtctgatatggttaagctttatgtccccacccaaatctctcgagttgtaatccccagatgttgagggagagacctggtgggaggtaatcagatcatgggggcagatccccccatgctgtactcgtgatagcgagtgagttctcacgagatctgatggtttgataagtgttgggcagctcttctttggcttgctcttctctctcctgctaccacttgaagaaggttctttcttccctttcaccttctgccatgattgtaagtttcctgaggcctccccagccatgtgaaactgtgagtcaattaaacctcctttgtctacaaattacccagtctcgggtagtatctttatagtagtatgaaaacggactaatacagggtctctgcatttgctcttccctctgtccatgatgcttttcctctaagatatctgcatggcttcacttttcatcaggtccatgctcaaaggccatctcctgtcagaagctctgaccaccaattaaaaataatactgtagtcactctccagtcccttaccatgaattatttttcaagatagcatttactatgatctgacattataatacatacttatttttgtgtgtgttcattcatcatctccttccctggagtgcaaacttcattagggaatgagccttcactgtcctgctcatgactgaatcccctgcatttaaaatagtatcaggctcctagtgtgtctcaaaagtgtatgctaaaatcatggagagtcaaccatccttaatttcctaccatgtgctggacactgggctgagtgttttatttgtggatcatacctaactctcacacccacattttgaggtaagtactttccctatgagaaaaacgaggctcaggtaacattaatgactttctcaagctggcatggttggtcctatgtaggggagctgtctgcccagcagggtaatgccttcagaccctgaatgctgagaagattatgaagccacaactaaaagtgataccagtgtgtaagctacagtcaaggacatttaatcaagttctgattttactcactatgactgttttgtttttggtttttgttgtaattttttctggaaataccccatttaaaaaaaattgtatgccccttgctttgctggtgcccaaaacacattctagttttttgtttgtttgtttgtttgtttgtttgttttgagacaagatctttctctgtcatccaggctggagtgcagtggggcgatcataactcactgcagccttgaactcccatgctgaagtgatccttccactgcctcagcctcctgagtagctgggaccacaggcacatgccacaatgcctggctaatttttaaatcttgtgtagagacacagtgttgctatgttgccgaggttggtctcaaactcccagtctcaagggatcctcccaggtcagcctcccaaagcaccatgtaatcccaaacacattctgaatctgcttattggaagccacagccctggacttgagcccctctattaagctccctctcctggattgtttgataggatatcaggtatctgccgcattaaggagacctttgagagacactgaagactcagcagaaggaatacaccattcctctttctggaagcctaccaagtccttttctttcccccaagaaatttaagagctgggcaaactagaccctcagaaggaaaattcttgcctctcctccacttcccacccccttttaatcccctctgaccccagcgctgacctctcaggaaagtcaggtctctctcagggtgagttctgaccagtcttcccttcttgaatttgcttccgaagtgggttatggaaacaaaggcccccagtgcagagaagccagcgtggtgaggggtgaactcgaaccaggtctctgcagaggaaatacaacggcaagtgagtcccagcacagaaccaggaatgtagcaggtatgcaggaaaaagaaatctattaatgaggaattacaaccatgacaggagaatgttagagatggactgtgtggtatcagaaaccactggggatctcatcctcagacctgagtctacgctgctggtggcagctcataacttccacagcagcctgtttccaatattttccagagcttgaaccctcagccctgcctctctcttccatctcattgtggctgcaactccatggaatcctggagtgcaagggaagagtgtagccacacgattgcatggaggattgtctgtgggcataaatctaatgcatgattccaatgtgagtcattagaatattccagggaagaaaatgacatgatcagattttcatcctggaaacttccatcaggtagccagggaaggaggtggacagcttgggatgggcgggccagtgaggaactaattacaagagtctcccaggagactgggagacctggtctggggatgatgtagaagagcacaaaggatgaaaatgaggagggggtgatttctaggtctgggaatgactgaatttgtggggcttatggaaaggacggagtcagctgtatctgctctggtgagaaaacagcacaaggatccacaccgaggagagagataaaacattcatggccgggcgtggtggctcacgtctgtaatcccagcactttgggaggcggaggtgagtggatcacctaaggtcaggagttcgagaccagcctgattaacatggtgacaccccatccctactaaaaatacaaaaattagccaggcgtggtggtgcatgcctataatcccagctacttgggaggctgaggcaggagaatcacttgaacctgggaggcagaggttgcagtgagccgagatcgtgccattacactccagcctgggcaacaagagcaaaactctgtctcaaacaaacaaacagacaaacaccattcacactgggggcttctgagccttgagatgccaggagacgcccaaccacaggtaactggtaacattgcctgatgtatcgtgagaacttaccaggacacagttgctgaacaagtgagtgcattttatgcttaggaaatagggtaaggaggtctggatctcaggagagagatgagctcaaaagagaaactggaatgtctggagagctgccagcatttgggtgataatcggacctatg[144 bp omitted]tctactaaaaatacaaaattcgctgggcgtgatggcgcatgcctgtaatcccagctactcgggaggctggggcaggagaatcgcttgaacctgggaggcggaggttgtggtgagccgagatcgtgccattgcactctaacctgggcaacaagagagaaactccgtctcaaaaaaaaaaaaaaaagtgagagacagccccacccacccaccccgccatccttcaaacatcccttattacagttttctttacttttttcttttttctttttttttttttttttttgagacggagtcttgctctgtcgcccaggctggagtgctgtggcgcgatctcagctcactgcaacctccgcctcccgggttcacgccattctcctgcctc[197 bp omitted]tccctcctctcctctgttttcttttttctttcttctttttggggggacagggtctcactttgtcactcaggctgtagtacaatggtgcaatcacagctcaccgaagccttgaattcctgggctccagtgatcctcctgccccagtctcctgggtagattcttcaggttcctgccaccatgcttggctaatttattgtgtttttttgttttgttttgttttttaatgttgttgttttgagatgggatctcactatgttgcccagggtggtctccaacttctggtttcaggcgatcctcccacctcagcctcccaaaccactgggattacaagcgtgagccaccatgttggcctcttaaaggttttcttgatccatgcaaagcaagtgcatgtcctctggtcacttctgggacttccctcttctctcgtctaagctgagcaccctgttttctgcaatcctgagcccttccctcttcctgggctccccaaggggagggcagggaaacattcttccattccactccgtgctgttccatcccttactacctctccctccctctaaatgtttgcttacctggtgctcttgcctcctgccaggaaggttgcaggtcattgtcaatggctgcaaatattgggtagggtagtgtcccttcttccacgggcttcttcatattggacaaatgagactccggcagctttgggagaaggtgccaagacagtgtgagggaggcatgtgggtcccacagggtggaacctctgcacgtaggccacatttttttttagaggggtctcagtctgtcacccaggctggagtgcagtggtacaataatgggccactacagcctcaacctcctgggctcaagcaatccacccacctcaacctcccaagtagctgggactacagatgcatgtcaccatgcccggctaatttattttttgatagagacaggcttttgctatgttgcccaggctggtctcgaactcatggcttcaagcaatcctcccgcctcagccacccaaagtgcttggataggctaggtgctgtggctcatacccataatcccagcactttgggaggctgaggtggaaggatcacttgagcccaggatttggagaccaccccgagcaaaaaagcgaaaccctatctctaaaaaaaaaaaaaaaaaaaaaaaaaaaaaaaaaaaaaaatttgtcaggcccagtggtgcgtgcctgtagtcccagctacttgggaggctgagctgagaggattgcttgagcccaggaggtcaaggctgcagtgagctgtgattgcaccactgcactccagcctggacgacagagtgaaaccctgtctcaagaataaacaaaacaaacaaaaaacaacaaaaacccgatgtgttaggataggctggatgcagtggctcatacacgtaatcccagcacttcgggaggctgagataggaggatcacttgaacccagtagttggaggattgcttgagctcaggagtttgagaccagcctgggcaatatagcaagatccctgtctctacaaaaaaaaaaataattaaaaattagccaggcacgatggtgcatgcctgttgccccagcttactcaaaaggctgaggcaagaggattgcttgagcccaggaggtcgaagctgcagtgagccatgatctcgccactgcactccagcctgggtgacagagcaagaccctgtctcaaaaataaaatgaaataaaataaaatagtgaattcaagacatcaaatggccaagcagagatggagaggaaagttgtcttgggtctgacactttccctatttctgccttattccatcataagtcctcattgttcttcttgccctggatgtctgtgtatctttctagtaaatcatatcactttatttgttgcataaacgaatcagagtcaatttctgtcacttgcaaccacagtaatcctgatatactttagttttgaggcatcaaccgaagtgcccagattttgatgacttgaaaatcctgaaggacttaaaaggtggtgctggtcagcatctttggtaaccccacaccctgagaccccttgctcctacccccaccccaggtccccagctgggaatgacttacttctctggtttgcttagagataaccatgtaggcccagaagtcggtcagagagtaattctcagacctcgctgcttggatggttttctgtaggctcttagccaagtcccactcctgtcgggtaaatcgatgtttcaggtcagcctcgagagcttccatgtcaccatcattggtgtagagagaagatattgccctggaggacagaggaagagagtgagttgggcattttaagtgtggacgatgaagactggggaaagatgtgtgcaaggaggtccttcacaggaacacctgcctcatggagagggcgacacacagaggaaacggaaaatttccattaaataaatacaactgcagaacgatcaagttcgaaggaggactcaaaatcatctgggacaatccttccatttcacaggcaggaaaatgagagcacgatgggagaaaggcctcatcagagtcaaatgttttttgcagccagcacttattaaaaggtttatatgtgacagcaacaaactgtctttagtcttttatacctattaactcacataatcctagaaaatcaatgaacggggccaggtgtggtggttcatgcatgtaatcccagcactttgggaggacgaggcgggaggattgcctgaggtcaggagttcgagaccagcctggccaacatggtgaaaccccgtctccactaaaaatacagaaaaattagccaggcgtggtggcatgcgtggtggtgggtacctctagtgccggatactcaggaaaccctgtctctactaaaaacacaaaaattagccaggcatggtggcacacgcctgtggtcccagctgctcaggaggctgaagca[298 bp omitted]aggctgaggcaggagaatggcgtgaacccgggaggctgagcttgcagtgagccgagatcgcgccactgcactccagcctgggcaacagagcaagactctatctcaaaaagaaaaaaaaaaagaaaaaaaagactttatattcatttgttcactcaataaatatatattatatatattaatttataaagaaaagaggtttatttagctcacagttctgcaggctgtacaagaagcatggtgcaaaaagcttctactcatggcagaaggcaagggagctggtgtgtcacatagagtctatatatatatatatatatatatttttttttttttttttgagacaggtcttgctctgttgcccagactagagtgcagtggcatgatcttggctcactgcagtctcaaacccccaggctcaaatgatcctcccacctcagcctcccaagtagctgggaccactacccaccaggtgcatcaccatgccctgctcatttttaaatttattttctgtagagatggagtctcactatgttgcccacgctggtctcaaacttgtggcctgaagcaatcctcccacctcagcttcccaaaatgctgggattataggtgtgagccaccgtgcccgggctcaataaaaatttttgatgttcttaatgctgcttatcgggtgctatctaccctcacaccatccaatgtattaaacatacatcatagctcttgagcccctgaagtgtggctagcatgatttaaaatatttatttcattttaattagcttaaatttaaacactggtactccattcagttattgggaaactctgaagtatgtttggaacaagctgggtatgaaaagttctttcctttaatatctttttttttttttttttgagatggagtttcactcttgtcacccaggctgaagtacagtggttcgagctcggctcactgcaacctctgcctcccggattcaagtgattctccttcctcagcctcccaagtagctgggattacaggtgcgtgccaccacacccagctaatttttgtatttttagtagagacagggtttcaccgtgttggccaggctggtctcaaactcctgacctcaggtgatccacctgcctcggcctcttgaagtgctgggattacaggtgtgagccactgccccgggcctcctttaacatctaatgagacttctgcatccaacttggaatgcgctcagtataaaacgcccagcagctttcaaagacctagtctgacaaaaggaatgtcaaatatctcattaacaatttttttcttaacgatgtgtcaaaatgctaatgttttggatatattgggttaaagaaaatggatcatttcactgtttctttttaccttcttgaagaggctactagaaaatttaaaatgggccggacatggtggcttacacctgtaattccagcactttgggaagccagggcaggcagatcacctgaggtcagaagtttgagaccagcctggccaacacggggaaactccgtctctactaaaaatacaaaaattagctgggcatggtggcacgcgtctgtaatcccagctaactgggaggc[133 bp omitted]aaaatttaaaatgatagaatagatgtggctcatgttacatagctctacttgatagctcaggttgggacgatttgcatgtgtttcatcatttaattctcaaacagccctgtgagatcagcacagtttgttgctgtcacatgtaaacctttaataaatgctggctgcaaaaaacatttgactctgatgaggcctttctcccatcgtgctctcattttcctgcctgtgaaatggaaggactgtcccagatgattttgagtgctcctttgaacttgaccgttctgcagttatatttatttcatgtaaattttccatttcctctgtgtgtcgccctctccatgaggcaggcgttcctgtgaaggacctcctcacacacatcctttcccagtcttcatcgtccacacttacaatgctcaacagcggaggaaaccaaggcacaaagaagtatgtctgggctcgtaacagcccacaaaggacagctccaggaactaacccaaagctgttgaaatataaggctttcgttgttgttgtttgtagagatggggtcttgctatgttgcccaggctggtcttgaactcctgggctcaagagatcctcccacctcgacctcccaaagtactgggattacaggtgtgagtccctgtgtccagccaggcctgcctttttaaccacagcagtctcggaaagattccagaagaaatcatggggttcctatctcaatagcgccccctggagttctgcaatgtgcagtacagctaaacccccacgccatgtcactcaacatgttagatgagccttggaggaatagaggggtccggtgtgactctgcaggacctttcccactcccaagctctgcagctctgctcttcatgctgtcgcctccaggaacctcatcctccacatccagctcagaacccagctccagatcaaactttgagcacagaaatgaaaacaaatcaggccagccaggctcaacattcatgcctctgccctgcctatctcacactcgagcctctgctgctctgcctagccttacctcctgctctgaaaatgtgccaagatcgattagtcatgtctgccctgggcttggcaacaaacatgcagacatgagtgtttcatacctgccatctggggcctcctgaatgagacagtcctacacggattaatgcaatactttatcatagaggctgataagttaaaagggctgtattctatccacctgcagtgtgaaaagtgcacctgaacatgtaaatcctcctttaatgtcagaaggtagtattattatgctttgtccatggctttgtgtagcaaagaaagatacttggtgttttcccctgcttcctggtgcagagttcctaaaacccttggaattttcttttttagaaaaaaaaaattttttttttgagacagggtctctctgtcacccaggctggtgtgcagtggtgtgattgtagctcaatgcagcctcagcctcccaggctaaagcaatcctcctgcctcaacttcctgagtagctgggaccataggcatgcaccaccacgcctggctaattttttcactttttgtagagatggggtcttgctatgttgccccgcctgggtctcaaactcctagactcaagcgatcttcctgcctcagcctcccaaagttctgggattacaggcgtgagccaccacacctggcccatcttttgtaatacaccagcaattgtaagtaaagtgtgttcctgagttctgtgagctattccagtaaattattgaacatgaggcggaagctgtgggaaaccccaaactattgccagtcggtcagaagcaccagcggctaggtaattgcaactcgtgtctgaagtgggagcagttttttgggactgagcccctttcacctgtggaatctgatgtgaactccaggtagccagcgtcagaattgctcagaattgtaggacacccagctagtaccagagagctcgagaagcagcgttggaaaaaaccacacacatttggtgtcaggaggaaaaaaataatcccatttatgtgtcagaaagcaatctgaaacatgagtgatgcttaccaagtggatccagagacccctgcgaggtacgtgacggcatccaacaggccctgttctttcatctcactcaggaccccaaggcaggcaatgtgagcccgcagtcctccgcctgagcccagcacagcaacaactggggcctaggcattggggagaaaatcgatcagaggtttagagcctgaggatggaggtgggaacaagaagaagggtacctggggccgggcaccgtggctcacgcctgtaatcccagcacattgggaggccgaggcaggtggatcacttgaggtcaggagttcaagaccaacctggtcaatgtggtaaaaccccatctctactaaaaatacaaaaattagctgggtgtggtggcacacacctgtaatcccagctgctcagcaggctgatgcaggggaatagcttgaacctgggaggtggaggttgcagtgagccaagatcatgccactgcattccagcctgggtgacagagcgagacgttgtctcaaaaaaaaaaaaaaaaaaaaaagaaagaaaagaaaagaaaaagaaaggaggaggaggagaaggaggagacctaggatctcccttaggcaggggcaatgcctgtcccatagaagttcatatccttctatttctatcccatagaagttcatatccttcggtccagctctccctggctgagttgggccctggacactgggcacagagggggcgattctgggatctctggggccaccctcctcccctcacttacctcatcagcctcaatccttagcttcttcagagctttcagcacatgaagtcttcgtctctccacggccgccttttcttctttctggagcccaggaattatggaaacttcagagcttcccaggagaaaacacaaagaagtccagaaaattcacagggaaaagggataaaacacagaatttgacctagaactgggctgtccaagcaggtagccaccagcccacgggtacatggtttccttttggggtgaggaaaatattctgaaactagatagaggtgatggttgtacaacactgtgaatgcattgaatgccagtcaattattcacttttcaaaatggttaattttggggccagacgcggtggctcacacctgtaatcccagcactttgggagggtgaggtgggtggatcacttgagcccaggagttcaagaccagcctggccaacatggtgacatacctccctccctccctccctccctccccttccctcccctccctccctccctcccttccttccatccttccttccttcctccttccttccttccctccttctttccctccctccctccctccctccctccctccctccctccctccctccctccctccctcccttctttctttctttctttctttctttctttctttctttctttctttctctttctctctctcttttttgagacagagtctcgctctgttgcccaggctggagtgcagtggcgcaatctcagttcactgcaacctccacctccccggttcaacaataagacagggtcttgctctgttgcccaccaccagtgcggtggtgcaatcatagcttactgcagccttgaacaccgggactcaagtgatcctcatgtctcagcctcctaagtagcttggactacaggtgtgtaccactatgcttggctaatttttaaaaatattttcttttattgtagagatagggtttcaccatgttgcccaggctagtctcgaactctggggctcaagagatcttcttgcctcggccaccaaaagtgctggggttacaggcatgggccaccatgcccaaccttcagctctttccatctatctccaccaagcgagaggaactgtcacagccctcacctcttgacactcactatgcattccattacacaaatgctctgcttccccatagtggtcagctctaagaggacttaccttcccatggtgcactgcggtcagaaaattctcagtcctcctgccaaagaaatggctcttcttagtcctgtgcccactgttgggcttagcaaagacagtgggggagggctgggactgtcacgggctcatgggttctccttgtccactgcccagacaaaaccaatgcgaacagcaggtgttgcagcaaagagagagagtttaataatctcaggggcggccaagcgaggagaatgggagaaatatttcaagcgcgtctctctgaaaatttggaggctagggtttttcctcgctctttctctttctctgcctctgtctctgtctctgtctgtctctctctctttagatgaagtttccctcttgttgaccaggctggagtgcattggcatgatctcggctcactgcatcctccgcctcccgggttcaagcgattctcctgcctcagcctcctgagtatctgggattacaggcatgcaccaccatgcccggctaatttttgtatttttagtagagatggggtttctccatgttggccaggctgggcttgaactcccgacctcaggtgatccacccgccttggcctcccaaagtgctgggattacaggcacgagccaccgcgtccgacctgagactagggttttttaaggaaactttggtgggcaaggggctgagggaacaattgatcggctatggatgaaatcacaggtgtgtccaaaactatctttgtatagctgagtcagttcctgggagcgggtctcaggaccaggtggtagctcttggtctgccaaaatgctcactctgaaaactatctcaaagacaatttctttt[133 bp omitted]tgtcatgcccgaatagggccactagagggccccttggtcttggggtaacgccagcgtctgggaagatgcccattgcctagcggaccttggtctagcggttgcgtcagtgcctagagaccaggaaagggagtctccctttccccgggggagttagggaagactctgctccaccgcctcctgtggagggcctgagtgatgtcaggcccgcccgcagttatccagaggcctgaccatctccctgtgatgctgtgcttcagtggtcacactcctgtttcactttcctgttccactctgtatacctggctgcaccctctagatagcagtagcagaattagtgaaagtattaaaatattaaagtctttgatctttctgaaaagaacataaaagaaataatgacataagctatcctctctctctacgccttggctacctaacatagaagggctccctgtccagtggacacgtgactcacatgaccttatcaatcattggagatgactcacactccttactctgccccttattatccaataaataacagcgcagccaggcatttggggccactatcggtctctgcgtcttggtggtagtggtcccccaggcccagctgtcttttcttctatctctttgtcttgtgtttttatttctacgatctctcgtctccgcacatggggagaaagacccacagaccctgcagggctggtccctacagtggcgcaatcatagctcactgcagcctccaactcttgggctcaagcaatcctcctgccttggcctcctgggttgctgggactacaggcatgcaccaccacgtctggcaaagttttaatttttttgtagagattgaggtctcactatgttgcccaggctggtctcattctcccgggctcatgcaatcctcctgcctcagcctcccaagaagtggggattacaggtgttagctaccacaccccactaaaaagctgagttctgtgtttcacgacagtgatattatttatagaagtagctggggaagttataaatcatgcgacccctggttacgtgactctggagcacatatagaaaaggaagctaagggatggcaggtcattcttcaacccacgactgttctttagcaaagttccagcaccttcatgattctaaccttgtcttatgaatgtgacttcaggccaggcacagtggctcatggctgtaatcccagcaccttaagaggccgaggtgggaggatcacttgaggtcaggagttggagaccagcctggccaacatggtgaaaccttatctctactaaaagtacaaaagtcacctgggcatgatggcgggcgcctgtaatcccagctactcaggaggctgagggaggagaatcacttgaactcaggaggtggaggtgccagtgagcagagatcatgccattgcactccagtctgggcaacaagagtgaaactctgtctcaaaactaaataaataaataaaaagtaaatgaatgtggcttcaatctctcaacaaggactgggggtcagttttctttgtctcaaagtttaactatgaattaaattcctctcatggtaattttggcctctgcactagaataagaaaaaaaaatctagcctgtgaggttagaaacaagatggtcagtcatgttagctttctctcattacttacatttctgcgaaggcagtttcaagaccccccttatgaaattaatcagcttccccccaccacctccaaattcatatgttggacttgtaacccccagaacctcagaatgtgactgtatttggacataggattctttttcgttgtttgctttttgagacagggtcttgctttgtcacccaggctggagtgcagtggtgtgatcgtggctcactgcagcctcagcctcctgggctcaagcgagcctctcacctcagcctcccgagtagctggaagtgcaggtacatgctaccatctccagctaaattttttatgttttgtagagatcaggtcttgttatgtcacccaggctggtcttgaactcctaggctcaagagagctttccaccttggcttcccaaaacgctgggattataggcatgagtcatcgcactcggccagacataggctcttaaaggggtgactaagttaaagtggggtcctgagggtggcctggaatttggtttgattggtttattttattttatttttttttgagatggagtctcgctttgtgccctaggctggagtgcagtggcgcagtctcggctcactgcaagctccgccttccgggctcacgccattctcctgcctcagcctccggagtagctgggactacaggcgcccgccaccacgcccagctaattttttgtatttttagttgagacggggtttcactgtgttagccaggatgatctcgatctcctgacctcaggatccgcccgcctcgtcttcccaaagggctgggattacaggcgtgagccaccgcgcccagcctgattggttttataaggagagattagggcctctgcaagaggcttcaggagaaaccaaccctgccaacaccttgat[134 bp omitted]caacatggtgaaaccccatctctactaaaaatacaaaaattagccgggtgtggtggtgtgcgcctgtaatcccagctactcgggaggttgaggcaggagaatcgcttgaaccccggaggcggagcttgccgtgagccgagatcgcgtcactgcactccagcctaggcgacagagcgagatgctgtctcaaaaaaaaataaataaataaataaaataaaataaaataaaaaagaaaaagaaatcctgttatttaattgcacccaatccctggtacttggttatggccgccccagcgggatgaaacagccctccctgcccccacggcttgcctgagcctgggtctggggcgtgtgcgcatgcgcggtggagcttgtgctccggaatccggtgcggaggcttgggctccctgcgcttagcggtgtagtcgctggacagctccttcagccggaatctccgcgggtgaagactgcggggatcctcggtgccaaagcttctgtggtcctcctgctttccttttccccctgtgggaggaggtcgcgggctggaggtgtttcctcctggtcctgagcagggccaacctggaggtaaaatggcccctgcgcctttaaacagccctcctcggcttgtaggccctgcttggttgctccagctttttcagctgttccagagctcacccggagctattttcatccgtgggatcacgtggagggctgggactttccaggcttccttagtgatgtcacccttctgtcattaggcacccgagaccagtattcaaaaaaagaatgttgtcgttatataactatattggagataagtattcctcaaaacagattagctaatcctcctatgcatctggctgtctaataaccatcatatataatatcatactcaaatacccagaaaaagaaatattgaggccaggcgtggtggcttacgcctgtaatcctagcactttgggaggctgaggcaggcggatcatgtgaagtcaggagttcgagaccagcctggccaacatggtgaaacaccttctctactaaaaatacaaaaattagctcggtatggtggcgtgtgcctgtaatcccagctactactcgggaggctgaggcaggtgcttcatcctgggaggtggaggttgcagtgagccagatccttagggccaactctggttcatttaatgtccatttttagaaaacctgtgagctccattcacagtgaaggtttgaagcccagaagtggcctcccaacagggtaccacatttcccagcacctttgcagctaggtgtggtcatgtgagcgagttatgtggtcatgtgaccgagttccagtcagtgcaatcgggcatctgtggggagcaccgcttccaagagtggctcctagaaacctcccatactaccctcctgcctactcttcctgaagcccagcactaagcgtcatcccaactcgatgggttttgaattttttttttttttttttgagatggagtcttactctttgtcgcccaggctggtgtgcagtggtgcaatctcggctcactgcaacctccgtctcctgggttcaagcgattctcctacctcagcctcccgagtagctgggaacataggcatctgccaccacgcccggctaattatttttgtatttttagtagagacagggtttcaccatgttggccaggctggctcgaactgctgaactcaagtgatccacctgcctcggcttcccaaagtgctgggattacagttgcgagccaccgcacccagcttgaattcttattttttaaaaatagatatgaggccataatcctagcactttgggaggccaaggcaggagtatcaccaattttagaacaggatttcaccagggggaagatggtctcccctgctccccctaacgccaggctcacctcttcagtgcccgcaactccaaccatcgcaggatcttttcactcctagacctgaccatgccactgccccgcctgcgggataaggttctacacctcgcaggagctcatgaggctctccacagtatagttagtagttatagatgcagggtcaaggagctgacagcatggaccaaaccctggcccaccacttcctagatagtggacctagggaaggtaacttacatccctgtgcccctcagtgtcctcacctgttaaatggggagaataaaagtacctacctggtggagccatcatgagggtcactgaggagtgaggatgaccctgactagcttcagcagagggacatggcggccgtgtgtggcagatgtgttcctggggccctgcactggtgcagggaggaagagccaagcccaaaggaaccatggtctccacacaaagccagtaatgtggggatcccctgacatacaacatttactttttttttttgccttaaacattttatttgaaattgaaacacaaatgcacactaatttgccagttctttaaggcagagctgtatcaggaactcttagctatgagaaacaagtcttttttttttttttttttttttttgagacggagttttgctcttgttgcccaggctggagtgcaatggctcgatctcggctcactgcaacctcctcctcccgggttcaagcgattctcctgcctcaacctcctgagtagctgggagtaacaggcatgtgccactacgcccggctaattttgtatttttagtggagacggggtttctccatgttggtcaggctggtcttgaactcccgacctcaggtgatctgcccgcctcggcctcccgaagtgctgggatgacaggcatgagccactgtgcccggctgaaagccatgttttagagtggcataatcgccctggggcttattcttcccctactcccatgaacaaaagcccacagttaggcagctgctgccctaggttcgccggtttagggtcgtcaggagagtttgttactctttttcctcatcattacaaggtggtgacttggctccagccatcatctctagtcaaggcaggaggaggggaggagctgccacaaccagggctgtcctttttggtcaggaaagatgtttctccagaagtccccagcagcccctgtgcttatgtcccctgggtctgcccacacagggctacagggccactgctagccccaaggagactcggaaggcaatgttgtcttcttgggctacaacaaatagaaacagaatgcccaagagattgtgtgcacaagagaccatgatggagacacaggaagagagacagggaggctgagtcacagtgacagacagcaaagtaagcctggcacagacttgcacggcagagagcaaagcctcgcagatagagaaggaaggggagagagggcgggtgggagacaagggcagaggaacctgatgagagagaagggaaggagggagggcagatgtgagaggcagaaacagagtgtgaggggcaggggacagctgggagccctgtgtcccccctgcgggagtatcaggacaccctgacactctcatgcccggaagctcctgttccacgctgggccccggggttagaggcctcctgctctggaagacccgagcctgggccccgctccgcgtgcagccgttttccccaagccagccccgtggtgcccagggctgggtgggtgttccaggcatcctgcttgccttgtctgaccatttcccgatggttttcctctaacatatcatcccatgtggggtggctgcaataataacagcccccatagatatccaggtcttaatcgctgaaacctttgatgtgacctattttttttttttttttgagatggagtctcgctctgtcgcccaggctggaatgcagtggcacgatctcgggtcactgcaacctgtctcccagattcaagtgatcctcctgcctcaccccactagtagctgggattacaggcacgcgccaccatgcccagctaatttttgtatttttagtagagacggggttttgccatgttggccaggctggtctcgaactcctgacctcaggtgatccacctgcctcagcctcccaaagtgctgggattacatgcgtgagccaccgcgcctggcccttttacatttttattaattttattaataaaattagaggagatgaagtctggctgtgttggacaagctagtcttgaactcctggcttcaagtgatcctcccacctcagcctccccaagtcctccccaaggcgtgagccactgtgcctggcctctgtgaatgtgtgatcttatgtgactaaagggactttgggattgagttaggatcctgaaatgagattatcctggatcatccagggggccctaaatgtaaccacttgagtacttggaagagagaaacagagatctgatggaggagaggacgtgacctgatgacctcaggagagagatttgcaggtgcgatgctgctggctttgaggacggaggaagaagccatgagcctaggaaccaggtggcctctggaagctggaaaaaggacacagtttctctcctggagctcccagaaggaaccggccctgccaccactttgatgttagcccagtaaaactgattttgaacttctgacctccgaaactgtttagggaatacatctgtgttattttaagacactgcatttgtcttccttaacagggctcacgatggtgcctccctgtgggatggctggaaggttaaacaagttaaaaaatatatgtatgtaaagattttagactactgctgtccaatacaattaaataaaatatttggtatggctgggtgtggtggctcacgcctgtaatcccagcacttaggggggctgaggagggtggatcgcttgaggccaagagttcaagatcagcctggccaacatggcgaaaccccatctctactaaaaatacaaaaattagccaggcgtggtgtcacattcctgtaatcccagctacatgggaggctgaggcaagagaatcacttgaacccggaaggtggaggttgcagtgagctgagatctcatcatcgcactccagcctgggcaacagagcgagactctgtctcaaaacaaaatcaaaacaaaacaaaacaaaacaaattcgcatcctctgtcatgctggccacctgtcaagggctcgggcattgcaggtggccagtggcggtcacactgcacagagcagatagagaagacgcccaccactgcaggcagttccatggctggcactggctctggcagttcctaggccatggctacatggctacatgctatgcaggtgacacccatgacagctttgcccccagagcccagcacagaccctgtcacaaagtagctatccaataattatttattgaaagaaatgacgggatgaatcccagactccggagtaagccaccccctcacacacacacccctcccctgactctcaaaatccacagcctgccacagcagatttgctaaaaagcaaaggcaataataaccctggggtccgtccaactcatgccctgtacccaggccctaggagggcgagggcttagtaggtatcttcagggtcagagcctgagtcctcgccttgttggttctgaatctgactttgcttccggtacaaacaggccacctgcggagagagggtgggacggggtggtcagaagctccctggctgctcccacctccacaaggttccagagaggccaccacgctaaaaagctggtagggccaagcagctgggcggcccacccctgcttcccaggacctcacctgagcactggtggtggcctgctccggctgcttgtcttcacggactcgaataaaccgagggaagcgaagggagatgcccttgtcactatccacctgcggaagcgggatggagactcctgcggtccagccccagcgaccccctgctcagtctcctccctcctccactctggactgtttcctgatccacatgacggggccgaacgatgggttgtcataaggattaaacaagttgacaaagtgcttggaacagtacccgggca[156 bp omitted]aaaagaaattagccaggtgtggtggcgggcgcctgtagtcccagctactcaggaagctgaggcaggagaatggcgtgaatccgggaggtggggagcttgcagtgagctgagattgcgccactgtactccagcctgggtgacagagcgagactccaactcaaaaaaaaaaaaaaaaaaatgccacctgctacagccgttacgataatgacggtaattcgggctgagaggctgaactacggcgccagggtatgggttctagaatctgactgtgggattccaatcccagctcccaactctcaggagccgcgtgatgcaggggcagttactcaggctctctagggctctacatcctcaccgtaaaatggagatgtttgtgtcactacgtcttacggattttgagaggattaaatgagtgtctatgagtgacacgctgatgaccacacagtgcccactgcacagcaagggctggatacacaccggctcctgtgccttgttactaagggtccctggctgtctaacgtgcagcatggtaaaacatttt[131 bp omitted]accccgtctctacaggcacgggtcaccatacccagctaatttttctattttttggtagaggtggggtttc[133 bp omitted]tcttttctttttttgagacagagtcttgctttgtcacccaggatggagtacagtggtgtgatctcggctcactgcaacctccgcctcccaggttcaagcgattctcctgcctcagcctcctgggtagctgggactacaggcacccgccatcacacatggctaatttttgtatttttggtagagatggggtttcaccatgttggccaggctggccttgaactcctgacctcaagtgatctgcctgcctcggtctcccaaagtgctgggattacaggcacgagcccccatgcccggcccatttttaaagaaaaaatgttttgatctttttatctgacactcaaataaaatgcaagctcatcttcctgatccttacctggaagagcagatgtgagccaaggtcccctccctactctgctctctgtgtgcccgcccagaatcccacacagggccacggccaggtcctctgccactcaccaggccccgcgcagcagggtagatgggagagagggagaggtcagcgcacttcacctcccacacagcgctggggtccagccagtggtcgggaatcacagcgccatctatccgcacgtaagggcgtgggctgggcagcaccagcgcctgcagtgagcagaggaagagaggaacagagggtctggaatctcaaagtcaaggccaagtgttggagggctggggagagggaggaagggaaaaaaacaggcacccccttgaagtaaacagaaataggaagtgaaataagggaaaagaaacaagacacccccttgaagtaaacagaaatagaaagagaaacagaaagtgaaagaagggaaaagaaacaagacccccttgaagtaaaaagttgagaaaggtgggagttgggaggaatgggagatggaaagaaatgaaaggccctgggggctgaggcaggacattaaagacaaaaagaggcagagaaagggccagagacctggaggaaggagacagagacacagtgggacagggacagagatgtagagagagagggcaatggagagagagaaccaaagagtgggacagagatggtgtcagggtccgtgtgtccccacccacatcttgtcttgaatcatagctcccaaaatccccatgtgtcgtggagggacctggtgggaggtaactgaacgatgggggcaggtttttcccgtgctgttctcgtgatagtgaggaagtctcacgagatctgacggctttataaagggcagttcccctgcacacgctctcttgcctggcgccatgtaagatgtgcctttgctcctctttcgccttctgccatgactgtgaggcctcc[135 bp omitted]cctctgcatcctgggttcaagcaattcttctgcctcagcctcccaagtagctgggaccacaggcatgcgccaccacgcccggcaagtcttgggttatttcttcatagcagtatgagtatgaaaataaactaatacagatccaatatgtaggacagacactcatgcctgaaatgcctgtgaccatgacaacattcattcacattgatcagggctcacaggcacttcacaaggagcagctatggcacctgctgtgtcctttggctaacccctggtgtgaatgaggcacagggcttggggaggtgaggctgcttgagcagggtcaccagctagtagccggcagtgctgagacatgaacctggagatgctggactccaaagccagctccactgcctgctgccctcctgcccacacctggagccccaagatggtggaagccaagagccctgcatggaaggactgtgctgtcaggggcaggggggagaggggtggaggctgaggcgcagccgccatggctcaccttgaggctctggtgatgctcctccagctcctcatcactgaagccagttccaagctgcagggaggaagcgggaggtcagaggctcagccagccacaggcccagcacttgctcctgccatctaaagctgtgtacactcatggcccccaccccactctggtctacgcagtatccacagaaaaccagggaagtagggagctgggggtgcggagcatccatccagagactcccgggtgggaatgttctcccagcaggcctgccgtgaaccactccctgtcttctgctttatggagaaactcttgctgcttccactgtctccctggccccaggaagtcactcccttatgc[132 bp omitted]ctgcaacctccacctcctgggctcaagcaatcctcctgcctcagcctcccaagtagctgggaccacaggcatgcaccaccacgcctggctaattttttaaaaaagtttttgtagaggtggggtctcactatg[132 bp omitted]acctaccaaaataggaaaggctaaaaattagcagtaatgctggatgctggcagatacgcagcaagtgggcaataatcaccaatataaacgtcacctggaaagccccttttgcattgagagtcttaaggattctttttgccttttgtcctgacaatagctcatttaaaaatctattctaaataatgcaaaatggtgacaatgtagattggtggccaaaacatttgtgatttataaaagtcacttctgtcactgatcgtttaggttaacggacactaagtaatcacattacccatcagaacaaagccggcaacaacttccccacacagccacggggagctggttcaggacacagcactatgtgctatggggcacagcacttgaaaactcttgtgcgggcattcaggtcctgttgccatattgcttaagggcatatacaacactgaaaacaaagtacttccagggtaaaaaggcagaaaagaaaattactcatagagaaggatcacaactttgcaaaaatgtaaataaaacattccctcaaatgtcactactgcgtgtctctgggtggtacgattctaggtgatattttgttctgtttctgtggcaaaagacccaaatttgttggagaggggaatataggaaatacgtaagaaaatctagtccaaaatgtgcacagctttaagaaaaactttaacttgaaaaaaagtaaatcactttacatttcccagaattccttgcagctaggggtgagccatggagcaaagtgatgagcaacagaacttgagcagaaggtgttcactggctgaggctgactcagggtccaaccccctttgctcttccctggtgcgtggagcaggcatggccatgagggctggaactcctgcagccacattgtgatgatgaggccagaggcacatggcagaaaaaaaaaatgtggggacaaaaaaaaatgtggggagaggaggaacctgaatccctaatggcatcagactgccccctccacacttctcatttcataacaaaaaaattcttttcttatgtgagccaccactatttgtagctaatctcaatctctcactgacacacattcctgacatctttctatcccagcctgtttttctatatgaagcaagagttgctcatagaaccagaaaaagtaaataaaaactggggagaacggatccttcacagggggatgtgagcacccctcggtctgggttgtgcaataggaaatacccccgggagtctaatctccttccctcctgcttctgccatcagccccagttccccaggaccttgcatatggcctgcagctcctcactgtcctcgtcgtaggaggccagcaggaagcccccgtaccggccggcccgcttcccccggcccaggtaggcgccgatcaccaccaggtccagggtgtcacccacgccatcaaggtagtccttcttcagctgggagaaggggaggcaagagatgagaagggggagcgcccaaggcggggccctcactgctggggaggggctcctcagtggactgaggagggactagaagtaagtctgaagggaacttccagaaggaaccccaaggatggcccctgggaagagactggacatgggaagggtttctaggtttaaataagaacaaatggggccgggcacggtggctcatgcctgtaatcccagcattttgggaggccgaggcgggtggatcacctgaggtcgggagttcgagaccagtctgaccaacatggagaaaccccgtctctattaaaaatacaaaattagccgggcgtggtggcgtgtgcctgtaatcccagctacttgggaggctgaggcaggggaatcgcttgaacccgggaggcggaggttgcagtgagccaagatcgtgccattgcactccagcctgggcaatgagagtgaaactccgtcttaaaataaataaataaataaataagaacaaatgggaaacgcaggcgggatcgatgggacctcaggagtcagccttgccgccgtctttccctcaggacagagacgtggccaactcactctggccactcctccaaagggagagcattttcccattcgttcagaaacgttcactaagtgctaaccatgtgccaggcagaagctcagccctgggggcacaacagtgctatttcctgagacaggaaaggtctgtgctggagggaaaccagccacagacagacataagtacacaggaagagctagtcagcaggcctggccggctcagtgccacaatgcctcccgctccagtccccttgtccacccctcactgcccctctccactcaaacatccatcaactcttactgatgacaggctcctgctcgctggccctcaacacacccgtcctccactcgaggggaaaccccaggagcttcgcacaatgacaacctgtgactcccggcacggaacccccactgacttcctgaaaccttcaagaggaagatccagttttatctcacagtggccccaggtgctgcctcatctggggcctgctccccactctgagctcacctcccgcctcgcctgcccttgctccctgcacacgcagaggctgctcctccctcagggtctctgcaccgggggttttcctccctagtgctctgtccctcactttgggaaagactcttcctgatcatccggggcactcccagccccgccttgctggcccggagctgacttgcttttcttcatggcgcccactcctgcctgactttctcttattcatgtcctggcttaattcctgcccaagagcctggcccgacacgggcggcaggctcaggagagagacacctcatcacgctgcacctcgtgggatgtgcggtgcttgggctggggctgttctccatcagaactcgtgagcaagggctcgcagcagggagaaggtctgaactcagttgcagcagggggctggggtgggattgtgaaaaggggccctgagctcagacagggtacacagtggaggctcgaaatccactgcctagctgggacagacctccagacccggggtggagaaggcccagttgggggtcgagaatcaccttgagccagttgtgcgatctcttggcgatctcgtaggtggcatcaacatccagggtcttcaccatcagcccctcgcaggagtctgagggagacacagaagcgtggtccttgggaagccctggctcacaagcgccggagcaggcaggattctggtcaaacggtccaggactggggacaggctgggaggccggggtcagcgcaagctgcagacctcaggagagaaaagtgagcaccctcacctttcactgactgctccaggaactcggcgatctgctcgatgtccttggtgtccagggaggtggcgaagacaaactcgccctctgtctccacaaagttctcccggagcagctgccggcgccgggaaaggggctcacgtaccagggactgcagggccggcagggagaagagagatgagacatctttgtgagaataaagacaataagccctaaatgtgaggcgaacaggacatgtgcgggtcacaactagtgacagggttcgtggaaagccttgagagggaagaaccctgatgtcagaaggattctgagagcttaaagcatggggctagtcactggcaagagggcccgacaccatttagagtcggtgacttcaggagcatcagacggggggctgcggccttgctggagcttgaattaacactttacgggcatctcatcagttttgttttttgtttttgtttttttgagacggaatctcgctctgtcgcccaggctggagtgcggtggtgcgatcttggctgactgcagcctccgcctcctgaattcaagcgactgtcttgcgtcggcctcccgagtagctgggactacaggtgcacatcacaagagatccacccacctcagcctcccaaagtgttgggattacaggcgtgagccactgcatccagcctcatccccaagataattaaaaaaaaaaaaaaaagtcctcctttccttagaattccaaaagttttcactgagtttttccagcacatttacagttttgtgttttgctttgaaatcagttccagctggaccttgcaagagtgtgtgtcagagaggaaggaggtgatctgagtgtttttaaacaaaggacaaagcagttgtctccacatgtcaacactgactaatccgtcttgtggctttgaattgcttttctcttttgttcgatcggtccccacccacgcgcagtgtttctggtctgccctttgctcagggcttctctgtgatgatgttaaactaccttcaccacttgccctccagggggacattcacgtgttttccatggacagcttttttctgttgtaaaattgtgctcatgaacattttgtatgaaaagatgagagagaggagccacaagggttaagcaggtacaatttatctggggtcagaccatttcaggtttacatcccagccacacgcttcctagctggtgacttcaggcaagcgtttccctctgtgtacctcagagctcccatctgtaaaatgcagcaatacctactcagggcacgtctgggaagatcagctgagcccgtgctacccagtgtagccgccaccagccatgtgtagcaattgagcccttgaaatgtagcaagttcaatcggagatgtgccaagggcaaaacagtcactggctttagaagacttaatccaagaaaagagtgtaaaattccatgttaataatttcttatattcatcacacattgaaaggataatatcttagacattggattaaagaaaatatgattttatctgtttcttcttaccttttaatatggctactagaagctctaaaattagaaatgtaggctactgcagtggctcatgcctgtaatctcagcgctttggaaagcggaggtgggtggatcacctgaggtcaggagttcaacatcagcctggccaacatggtgaaaccccgactctactaaaaatgcacaaattagctgggtgtggtggtgggtgcctgtaatcccagctacttgggaggctgacgcaggagaatcacttgaacgccagaggcggaggctgcagtgagccaagatcacaccactgcactccagcctgggcgacagagactgtgtctcaaaaaaaaaaaaaaaatcatggggatgaggacacattaaacagaaaaaaaatgatatacttgactacataaaaatagttcatccatgttcaactactactaataaaaaaatttgtaaaagtaatagctcaaacaagtcctatacaacaaaataggccatcaataaattttaaagaaggaatatttgaaggaatgagaagaaatatttgaaatgctcatgggagacaaaggaaccagctgagcagggatgatcaaatcctgcagaaaaacccacaaagtatccagtgtttggaaagcacctgatacttgactttcctctccccagacatcacgggaaacaaaaatcagactctgactgtcttcctacagtaatttcatgtagtgaaacatcagtctgcatcatgaaattgggggtttgagcatcaaaggcatctctgcattagaaccactaccagctccacctgtcccggcgaaggacagatgggcctaacggagaaaaaacgtttacagaccaggaagacatgagtgagaacccaccagacaggcaggcaaaagacacgcggaggcaagtcacggaacaaatgcacgcggccaacaaacctgaaaagatgattgatcatcaatatccattaataagacagaagtgaccaagttaccacaagatcgtggttcatctaccagatgatcatctgggatgggccgggcgtggtggctcacgcctgtaaatcccagcactttgggaggctgaggtgggcagatcacgatgtcaggagatcaagaccatcctggccaacatggtgaaacaccgtctctactaaaatacaaaaaattcgccaggcgtggtggtgcacgcctgtaatcccagctactcgggaggctgaggcaggggaatcgcttgaccccaggaggcggaggttgcagtgagctgagatcatgccactgcactccagcctgggcaacagagtgagactccatctcaaaaaaaaaaaaaaaaaaagattatctgggatattgatgattgcagctaattttttttgagagcttccatgtactaactactgagttccacacccctatcccactgtttagccctcaccctaacagataaagcacctgccactgttagctccttactgtagatcaagaaactgacacacagagaggctgagtcattcatctgtagccatgccgctaggaaggttagggctgggatatgacggcatgtggcctggctccagattcctgacatcctaaagcaagctgttctcaaactgttgtcttgaggcctctttaacactcttaaaaattattcaaggccaggcgtggtggttcacgcctgtaatcccagcacttcaggaggcca[134 bp omitted]gaggcaggagaatcacttgaacctgggaggaggcagttgtagtgagctgagatctcaccactgcactccagcctgggtgactgagcaagactcttatctcaaaaaaaaaaaaaaaaattcaagactcactccatagagcttgttcatgtgggttacataatattatagttacacctattagaaatttaaaatgagaaattaaaaaaataaatccaatatgctcacccaaataatattaattttttttttttttttgaatagacacaaggtcttttctatattgcccaggctggtcttgaactactgggctcaagcgatcctcccacctcccaaagtgctctgattacaggcgtgaaccacagtgcctggctctaaataacatattttgatgaaacataacccaagttttgagaaagtggtgagactagaggcattattttacacttttgcaaatcctctaatatctggcttaacagaggctggattctcctgcgtgcttctacgacacactcttctcgttgcaggacctgaggaagatccacctcacgccaatgtggagttggaaagagagggaccttgaagatgtccttgaaagaatcttaaggaacctcaggggtcctcagaccacactttgagaactgctgcccaagtgtggcttcctggccatgtgaagtggcagagtcggaaatggaagtcagaggggcagctgccaggctcacaccccaccccgtcacccctcagctgcccctggacaggaagctggaactcacctctccattgaggtagatgaggtcgaaggcgtacaaacacacctgcacctggatctcagacgcatccacctcctgggttggggcacaacggagttcgtgagtgcaggaaggtgagacggggcactgtgcctgaggccgacagcattcatctaccggtctccctctcgccccacctaactggctgcccatctgtgagggcggccatgctgctggctccaggtgctggatcgttaacggctctcagctaattccgacaacctcattccccttcaccagatatttgctctcctagacttttctgcagctaatggcagtgacatggcacagttctggccaatgagatggaaaaggggaaacctgtggggtgcaggttgtggggttttccagaacagatcttctttcatagtaaaacaacagagatgcccgaaaagggcccttcccctcttcctacttgggatgctgggatgagaatgcgatggctggagctgtggcagccattctgcagaaggctgagagaagtgcatccagactgacactctgcccttctgggcactgggcaggacccacagccaggactgggtggaagatgaggaagtacggggccttggcaggcagtggagcgggtgatgctaccttgcgtttgcgggtggtgagcacttggaatggctggatctgcttcttttcccggtcccaagccacggcttcggtgtccaggatgaaggatgtgaccgatgggagtttaatctgaaaagtgaagggagagacccagggcctgagagaggtggaagatgaggtggaaagacaaacacggggagataaattcccttttccttctgcagctctcaagatgcactaacaaagaggcaggtgcacacagatgcttttcttttattccccaccaagaggagacagaaactaatgtctctgagaatgtaatatttggtctcacaagctggaaacctaggagctcttgtcatctccctcctcctgtcacccacattcagttcctcagtgaacctgatgatttcctaagccgtccacttcccaccaactccctgctcagcctcgcctactgggcttccctgtcctgcaccgatcccctccaatccagcttccccatagcagccagggtgacactggcaagccccaaatccgatcacagcacctccctgctaaaaaccatccccatgattccccaaagctggggggactctcccgggtcagcctgggtcgtccctcgcctcacctggccccctgagcctctcttcaccccagcacgtgagcctctctgtttctcaaataagtgggcaatgcctcttccactactgggcctttgcatgtgccgttccctctagaacccctgcccctgtctgtctcctccactggcaagccttcttttccctcaagggaacactgttgcccaagccgggggcagcattcatgttgtatcctggagccaggtagcttccctgacaccaagtctaagccacacctatttctttttgagtcagagtctagctctgtcgcccaggctgcagtgcagtggtgcgatcttggctcactgcaacctctgcctcccaggctcaagcaattctcctgcctcagcctcccgagtagctgggattacaggcacatgccaccatgcctggataaattttgtattttagtagaaacggtttcaccatgttggccaggctggtctcgaactcctgaccgcaagtgatctgcctgctttggcctcccaaagtgctgggattataggcgtgagccaccacgcctggcctcttttcttttttgagacagtctcccactgttgtccagcctggcgtgcagtggtgcaatctccgctcagtgcagcctctgcctcccacgttcaagtgattctcctgcctcagcctcccaagtagctgggactacaagagcacgccaccacatccagctaatttctgtatttttagtagtcagggtttcaccatgttggccaggctggtctcgaactcctaacctcaagtgattcacccgccttgccctcccaaagtgctgggattacaggagccactgtcaccggccaggcctgtttgttacataggctcacagaatgctggtcctttcctgtggagcccggatctccacatataatttacagagccagctgcaggactctctggtgaaggtctgcctgctctgctgggctgtgagctcagtgagggcagagaccatggcaggcctgttacactcccagcctccagcatggggcctagctcggagcagatgcccagtaaatacttgctgaacgaatgagcaaaagcagccagatgcaagagactagtgccatattataccaccaacaggaagctctagaacaggtaaaaccaacctgtggcgaccaaaaagcagacctggggttgcctctggtggatgcatggtgttggacagaggagggggccttgcttggccagggacacaaggaaatatttgattttttatttttatttttttgagatggagtcttactgtcacccaggctagagtacagtggcccgatctcagctcactgcaacctccgcctcctgggtacaaacgattctcgtgcctcagcctcccaagtagctgggactacaggtgcgtgccaccacacccagctaatttttgtatttttagtagagatgggatttcaccatgtcagccaggctggtcttgaactcctgacctcaggtgatccacccgcctcagcctcccaaagtgctgggattacaggcgtgggccactgcgcccagcggaaatatgttagaatgatgagaatgtggaaatattttatacattcattggggtgtcggttacttgggtgtatgaacttttcaaaactcatcaaacagcatagtgcacactgaaaatcactaacttttagggaaattacatcttaagaaaattgatttaaagaacagtgcttggcacggaacaggagctcccctaacacgtgcactgaactgtgcctctctctgtcactgtctctaacaggcagaatgatgggcaccgtgccccctgctttcttaaataacttatttcctatttaattaggggcaggcaaagagaaaggctctttgataggggactcctcgaacaggcacgagacccctactgggtgcagagaagtccccaactctggggcctgtgaggcccagccctgtatgactctgagctgctatttctgaggcttggggcctatccacaggctggccccctccaaactcgtcctgactcctcctccccgcgttcctggctggagaggctgcagagttagactctggctttccgaggctttgttgcactagggtggccatggaacccagtgctggacagtgactcccagctgcagtccacggcgggggaggggttgtgggtgggaggtgtccaggaaagtgttaactcaagctagaatcccttttccctctttctgtctggaagaatgacatctgtttgggaaactctaaggggacaagcattggcactaaaagccaaccagccaaggacagcaggggatagaggtagcgataagcttggttcagggggacatcagtgctcagccaagtcggtgctggggtgcccacctctagatgtgagaaaaaatcatatgggcttacaccacgcaggactgagtgctctgtcatttgcagccaaacgcaacctgatctcctcccaataaaccccgcactgtgccacactggcctagatgggcctcaggcctttgcacccctgaccacagaccctggcagagtgcaagtgtgtggcagacgcccaccttggggatgcggctgatgatgtccgggtacttcccagtgttgtcttcctgattcctgctgaagatcttcacctccccgccttccagggcgtggatctgtcacgatgggagaagggaggggaaatcagctgagtcccctcatgtggcctcagctttctcttctgaccccacctgcactggtagaaggttctggaagctctggaggaggaactggtgcagagacttgagcgaatcatctcctcagttccaacagcacctcccagccctgctctggaaggccctaccatcattttcttcttcatttccaatccctacacctctccccatgtaggcacatgcaccttgctgcatgtgggtgctgatttgtttaaatgtcattatgctctagatctcattctgatttttttttgaggcggagtctcgcccaggctggagagcagtggtgcaatctctgctcaatgcaacctccacctcccgggttcaagagagccttccgcctcagcctcccaaggagctgggattacaggcgcccaccaccacacctggctaatttttgtatttttagt[136 bp omitted]ttgagcagggcggcatatatagcatcttatatgtttgttattatttccaggaacagttgtcaagaaatcattgtcactatcgtaaatcatcttgtgtcttttttctcaacactattttggagatccatctctgatcctgtgtctgttggatccaccctttttttttttttttttttaaaagatggagtctcactcttatcgtggaggctgtagtgtagtggcacgatcttggctcactgcaccctctgcctcctgggttcaagcaattctcctgcctcagcctcccgagtagctgggactacaggcacacgccaccacactggctcatttttgtggttttagtagagatggggtttcaccatgttggccaggctggtctcctcaggggtccacttcctgtaactgccccgagccctgtggctcccacccactttgcctgcttacctatccccaggtgagaaggccccacacttgccaggacagaagagacacaacacattcttacagaccccaggaccaaggacgcctgaggccctggatcacaggacacacatgcacgtcacggcatgaaggggtcatgtaggcacctcccagaacggctgttaaaatgaacacacccaccagcagcatcagcggagcccacgtttcatgagctcccactatcatcggtcaggactctggaggattgtagcttcggataagctggtgaggtagttaagaccacaccctagaggccaggcacgatggttcatgcctgtaatcccagcactttgggaggctgaggtgggtggatcatgaggtcaagagatcgagaccatcttggccaacatggtgaaacctcgtctctactaaaaatacaaaaaattagccgggcacggtagcgggcgcctgtagtcccagctacttgggaggctgaggcaggagaatcacttgaagccaggaggtggagg[138 bp omitted]cgagggctcggcagtctgtggcgcaggccggcttgaagctcaggcctcagtgaccccacacccctgctctttgacgttttcctgtctgtggaagggacatgtcccactccccatacctgtgccctctgcccgtcatatttgtattcgcaggtgaaagctgcctcctcaaagcgtttcaggacctcgctgatgccccgggtgggatgggccaacattggtttcaggggaatccctgggaaaggaggagagtgagttagaggagagggaaggcaatggattagagggggaacatggagaggagaactgctaatgggccccaggaccattctgctttcttgctattcagtcacgaagcctcccacgttttagaaggggacctagcctcccactggggactacagcccccggccttccttccaggtgggaaaggccatgtgattggaacccacgcagcatgtgcaatgtctggctcacatccttgcaaggaatctggttgcctcccctccctcctctgcgtccctcctcccacaattagaacagggaagtgagccacatttgatcacagacattggggtgacaacctttggagggcagagggacacaggaacctgggtccccgggtcatccctgggacacagctgcacacctgtaccttccctggccacctcccttgctctggacacttctgtgtgacagaaagaaattctatctggcctgacccactgccttctggcccatttttatttacttatttattgtctcactctgtcgcccagctggagtgcagtagcgcgatgacggctcactgcagccttgaactcctgggctcaagcgatcctcccacctcagcctcccgagtagctgggatcacaggcacacgccaccacgcccggctcctgtttatcacagcagtgtcacctacaccctatctactccacaaggggaaattccaaggagaaaagcagtgggtttcagcaccagggaggagcatttggttttggtgggggagaggactctgcaagttctgagaggggcgcctacgatggccaccctcacgccgactcaggagggagcagggctgctgccaggctggtgagcgcccctggggcctgtacctgggctcagcttgcagtgctccgggagacgttccaggccgtgctccagcagcacggggataattcggtccaggtcgggaacctcgctggggtggcgggtgagaacaagataggggaagcctttctagaactcacacagtttggaaagagagctcggcctgctcccagaagcctgggctcctggatgcctctgcccactgagtcaccacctgccaagctcctcttgccaccctgtctctgtgctctcccttcgtgtcactatctgttgctttgtctcccttagtctggccttgcccctgttccctatctgtcaccacgagaccagcgattctctactcggctacacaggagaccactcaagaatacagtttttaaaaaaaggtttttggccgggcatggtggctcatgcctacaggcatgtaatcccagcactttgggaggccgaggtgggtgcatcacttgagcccaggagttcaagaccagcctagccaacatggtgaaatcccatctttactaaaaatataaaagttagctgggggtggtggcacgcgcctgtagtcccagctactcaggagactgaggcaggagaatcacttgaaccctggaggcggaagttgcagtgagctgagattgtgctgctgcactccagcctggatgacagggcgagactccgtctcaaacaaaataaaaatagacaaaggttttcaaggctaggttccacctacaaagattttgatgtagctggtgtggggtaggcctgaggtcagcagctgatagagccccacgtgcaggcagagttgagcttgctgcccgggcctgttcaccactctctgctcagcacccagtggggggccctggcccagagcaggtgctctgaggccatctgtggaactgccatcggccctcctgcctctgacatcctctctggggcagtcatgatcttggagtcaccagccctgggtcagctgctggcctaggtccctccacatggctctctctggagccctcgtggccgctccacggatgtcctctccatgactgtcaagacccttcaccatgtgtcagtcacctgctcctctctgggtcccttaaggcctttctgcatgcacagccctgtctggcactcagaaacctcatgttgccggctgccctcccttgctgtcagcgtctttcttttttttaagacagtctcactctgttgcccaggctggaacgcagtggcgtgatctcagctcactgcagcctccaactcctgggttcaaatgattcttgtgcctcagtttcccaagtagctgggattacaggctaatttttgtatttttagtagagacagggtttcaccatgttggccaggctggtctcaaactcctgacctcaagtgatctgcctgcttcaggctcccaagtgctgggattacaggcgtgagccactgtgcctggccgctgccagcgtctttctatacctctcctggggtcactgacccttcactgtttgccaccttcctgatctttgtcaccatccttgtgtcaagcaccagccttgtctagatcaccacctctgctctcagtcaccccgtgaccggcactcgtgatgcctgtccgtcacttcactggccccacccactgctcctctggctccacccccaccctggcactctgcccacagcccctggcaactccacccactgcccagctctcaccagaacgtctgcttcaggatcatgccttgctcctccagccacgtctttctggcctctgctgtcttgcccttcccagcatccaccatggctggtgggaattctaagaaaagacccaccagaggctttggaaggcacccacatccttggctacaccagggtgcagtgggtggtttgctgtatggcaaggaatgcagatgccgcggcccaagacgccccctcccccccacccaggagagaggagcctggtatggcaggggcccgctggggaaggggcgggcatgggcctctgaagaggaggggggaagcctgaggtaactccagcgagggatgcagagacgggccacaggagctcaccttggcccgggggcgtgaggctcactgcctgggagagggcagccagcaccgactgctctgccagcccaaggcgcagccgtccgctcagggacctggggagagagcaggccagggaagggggcttgtctgcacctccccaatcttgcctcctcccttctctgatctcctcgaccttgatgtatgtagaccctctcctcaaaaaccagaagaatcttcagagcctggaagggaccccagatatcacacagccccatgtgacagatgaggaaactgagccaggcagtaatgatcctgcccactagcatagactggggaggggcacaagtaggtgcaccagcacctcccatctcagctgccctgaggggttggcgaggcttgaggaggatgagtcagggagagaactgagcctggcgcccgccctggtgactgtaatggtcaggaccccagcatggtccttgctttgagccagtggcaggagacaagtggcttagtttgcctccccatgtctccatttccccttctataaactggaggtgagggtaacaagaccagtctcacagagttgctggtaggaactgatgaggtaaggcacggggcacagggcagggctcccaagaaatgctccatgatgtgagccctcaatggatttgctctcactgtcatggcaaacaaaccctggcttcctgctgcagggcccgcgcccaagccgaggcagacctcaccaatcaatcacagcatgcttcacccacaggggcccaggggccttctctagacagcactaccaagggacagaagctggcctgtgaaaggaaatggtgtcccttcccactctttaggggctgggcctcctgctcatgcttttctcatccaaggatggtcagggcatttgtgatgattccagctgccagtccctccctcctttcacctccgagcctgcagtccccctctgtagcctcacaggcccacacgcttacctagcgatgaaccgggcttctgagtggcggcaggccacaaagaggcctttgatgatgtctatcttcttggctgtggactggagagtcaggggaagagccgtcagtgcctggtgaaggcagggaccacacctccaccccaccagccgtgctgctgccctgcattttggaatacctgccctccttccctcaccccatccccatgtcccagctcccatggccgcccactcttagggcagtaagaacgagctagctctcctccttgcctccctctccctttatccaggaagtatttactgagtcctgtcatgtggcagccatggcattaggtctgctagactctgaagaggagactcccctaggattgggtgcaggaaggaggagaggaagctgtgcaccccatgagaaggactgatgcgacccagctgatggtctacccagaagccttcctgacacacgcgtggcctcaggtccccaagatgtctggggtccgggatgagcggcccgccccactcacagcactgccagtgagcctggcgatgtcgcggaacttgctgaagaccccggaggcagtgagcggaggtggtggcagcatgagcctctgggtgctgcggctgttctcggccaccagccccacgtcgcctttctcggctgcctcagcccggacggactccagctgccgaccttcaggggagagcgcgggtgggggtgtcgagggtgacagttgtggctgcgtgtctcccttctctcgcggcctggatgaattttctccagctgtgtgtgcttgtggcgagtccctgcacctccctgtgtctaacgctcacccacttggtagaaatggcttggggaacgtgcccccagccacgctggctgtaggaagtcagcaaacatgcacgtggagccaggaaagcggtggatgaacgagcatgaccacactcaggggagacatctgggccggtgtcatcagggcgcggatgggatttaaagccacaggcgggacaaggtcactagggaagtgagtgtggacagagcagagaaggccaagggaccctttcctctggcgggtcatgaacatctctggcagtgaccaaagacccttcggcttgttttggagccaccagcttacacacgtgggatgtgctctggccccacttactgtccagagctgggtcccatgggcgcctgggtgtaagagctggggagatggagcctcaagtcacggtgacagctgtgacaagcagctctcaacctatcagaaccaacacacccttgtcaccagatactgtgtgtcacctcttttctggtctgaaataaaatgtggagataacataacctgcctacacctatcgagataacgccctaaccctaacacagaaaagaatgaaagggaaagcaatccgtaatgaacgaacaagtgcgcgtttcagtccacagatgctcagccgcggcacagagcacatgaaggtgggcctcgcgcctgaagcgaaactgccacaaatgggagagccgacagtgtgagcctcaccaatgggatgttatcgaatcacacatcaaaggggacgggattctccaaagtggccaacaactcacaacaaacccgggacttggacagccacgggggccacaaggcggcacggagagcagtgtgagtgtgaacacgacccatcaagggtggaggcatgagacagtggaagaggccccagctgccatggattgttgggcaggaaagccagcatctgcaacttcttttgtgagaaaaacagatccttctttgtccaagccaatgtagttgggttttctgttacctgcagctcagagtattcttaaccgaccccgtgtgtgctgggtctggtatgacgtcagtgctcccgaaacacatcttgagtgaatgagtgagaaaatcttgagtctcatctcctctggctcccataagcccgtaactctttcctgatccaagtcaacctttctcagtccctctgtcctctcatgaaagcctgaaacccctgccttccctaaatgttggtgcccatggccctaagccagctccagtgctcccagcacatcctctccccaggcggatgagaacccaccagtgggtggtcatccctcctacactgaccagcccgaaccctgggctctgagccagacctggtgagcctcagacccgtttccaaacttcctggatggccctgggggcccacagatagaggttgctcatgcctgccccacgctggggtgattaatgccccctgcaggtgcctgcccctcaccagggtcccaagctgccgacggctttgtcatccatccagtcacccagggagatcctggaggcattcctcctgcctcctcaccctgacatccactgtctgccagatctctcctgccctcttctctcttctctacagctggggtccagctcctcttccccctggatgctgccccttgcctgctcacaatccttccatggctccccagtgtcctcatgataagcaccgagcactccaggcccttggcaggcgggccatccgcatcaccagcctttccacccagcactggcggctgggccccttcaggctgctggccccccacacaccatgttctttcctcccactccttccaatccctccagtcaaagtcctttcagacctctctaagccccaaccttccatctcagcccccaaatcctgctgtctctgcctccagcatctttccccagccctccccttccctgcaccccacaccccctgtcccagcacatgcctggtcctccctcacctgaactgctgcccctgtgttctctcccacacccctgcaaatctgtccccatcaggctctcctccctctcagccttctcctcaaccctgtttcacagcctctctccaccatctctccgatccacctgacctctgcattttctctggctgagctcctgtccttctggtccctccaaccacagtcccccttacctgtggcctgggccactgccttgagaaggacaccatcacccacgccaagctccaggccctgctggggtggcccaaggtggttgaggctgaggtagaggacagggaggaggtctggaggcgacagggccaccacggagcgcagcaagttgctcagcgtctccaccatccggagcctggaggaggggacgggggtatgaacacgtggttcctcaaggtcaaagtgtggtgtcggggtggggtgggtttaagggggtggacactagaaagaaatggagaaagaagaggaaagggctcagaacagtcccaggctctggggcctggagccatgaggacaatcacagattgctggaggtgaaaccgcctttgcaaaaccgtaactgaggaaattatgacagtggaaagaaatcacacctaaccgattccatcttgcttctaacctttaagctgtccttgttcagtcctgggcataggcagaactaactttgggaaggaatttggttcgtggcttgactctgaaacgaaattggtaatagccctttctggaaaagacccctttttgcctaaggacctgccttcgcaagactcacaaattagctacaagattagaaatttaggtttaggggtcacgcagcctctggcttccccgattgctcctggggataacatcactactgtaaaacctaagatgagtgcttaagatagtttgcagaccctgcactcagtctgacgccacccagactgtaatctggctcaacaagttctgccatcccacccaggaacagaagacagcaagaaaacctcccttcgaccccctgtgagtccatcttcaacctgaccaatcagcactccccacttaccaagcccctacacgccaaattatctttaaaaactctgctccccacatgctcagggagactgatttgagtaaaaatgaaactccggtctcccgcacagccagctctgcgggaatgactctttctccactgcagttcccccgtctagataaatcggctctgtctaggcagcgggcaaggtgaacccaccggacggttacagtgggggagtaacttggtgtgacggtaacaatgatgaagatggtgatgatcagcccagagaaacgacagctgatgctacggagcattttctaaattcaggagctggctttgagcactttgcaccttttttttgagacggagtctcgctccatcgcccaaggtagagtgcagtggcacgatctcggctcgctgcaacctccaccttgtgggttcaggtgattctcctccggagtagccgggactaccggtgcgcaccaccatgcccggctaattttttttaatttttagtagagacggggt[144 bp omitted]ctctgaggtaggtaccattattatttccattttacggataaagaaacagaggcaccgaaagagtccgtggcttgcccaaggtcacagagcgagtaagtatgaagctgagatgtacaccaaggccgtgtgcctgaggactgtgctcccagccaccaagctgcaccacctctaaaacgaaaaccgtgtttctgtctaaaacttcaaagctggaaagaatggctttgttactgaaaaacttagggggcctcattagaaacagaagctgggtttttcctacagaagtctcattaccgaggtttttaaggtgcagagaagaaatacaaaaaccaacatcagggaaatccctcagtaatcattgtaggcaaaagccaccattggatggtgcagtggatggaacagcccccccaaaattcaggtccactcagagcctcacaacatgacctcatttggaaagaaggtctttgcggatgtacctgtagattaagatgagagcatagtgaatgaaggtaggctctgaatccaaaaagcatccttacaaaatacagaagagggccgggtgtggtggctcaggcctgtaatcccagcattttgggaggccgaggcgggccgatcacttgaggtcaggagttcaagaccagcctggccaacatagtgaaaccccatctctattacaaatacaaaattagggccgggcgcggtggctcacacctgtaatcccagcactttgggaggcggaggtgggcggatcacgaggtcaggagatcaagatcttcctggctaacacagtgaaaccccatctctactaaaaacacacacacaaaaaattagttgggcatggtggcaggtgcctgtagtcccagctactcgggaggctgaggcaggagaatggtgtgaacctgggaggcggagctgcaagtgagccgagattgcgccactgcactccagcctgggcaacagagcaagactccatctcaaaaaaaaaaaaaaacagagtgctgggaacagcctgaaatgctccactcatgttggggaactgagaaatggcatgtgccatgtgagaacgaagggacactacagagcagtcacaacaggctcgaaccactcaaccaacatggacacatgtggaaacgggtttgatagtgaaggcaagcagaatgagccgtacccatgataattttgtttgtttgtttttgagacagagtctcactctgtcacccaggctggagtgtaatagcgtgatctcggctcactgcaatctctgcctcctgggttcaagtgattctcgtacctcagcctcctgagtagccgggattacaggcacccgccaccatgctgggctaattttgtgtttttagtagagatggggtttcaccatgttggccaggctggtcttgaactcctgacctcaggtgatccacccaccttggcctcccgatgtgctggaattaaggcatgagccactgcacccagcctccatgataatatttatataaactaaatacacaggggcgagtgctgggggtgaggaggacaaggagagaagaggaaatggggacagagaagggggctggcagggaccagcgatgctaacatgctgctgagaaggaccagggtggggcagtgctatgcactgggcatcactggggtgggacgctctgcagggaacctctgtgaatgagtagggggtcctcgctataactgagacctcaccttcttttgtgaatatggagacatgtaagcaagactgaagtcacttttgatgactcagggtggactagaagtaatcacggactgtgtgcaatggtgccagtcatcccgagatggagcctgtctccttaccctgcacatctgggctcgccccttgtgtcttgctctgaccatgagaatgaggcagaaagtcaagaggacctgcagccgcttttgtgaccatgtctgacatccatgatcatacgcccgagcggggtcagaggccaagttgacagggtttggcggaacaaggcagcacagaccgccatgcagaggacagacccagaagcgaccccgccccccacccaggcagtcctcattagttaccgagcagacacctcctcgatcttctcaaacgtccgggccacagccaggtaaggaaccctagggaaggaaaagagacgcaagagtgacagtggtgcaggctataccatgctgcccgtctgcacccttgcttcctcacgcctcctcgggacacccttgccaatacccaaatgcatgagctcacttcccagggctgtctctctgtccctttcaatgctgctgattgtcgccaaaacacaggagggagagacttgaccatttctcccaaccaagactctgcttagagagcctccggtggcaacagggaccggagggggacagtctgaaaagggagaaacctcacttctggcccggtttccagcaggcatcttccacgggatgatagttgttcttggcaggattgtaaccagatggatccaggggtctacggaggcaaaacggagattgaattgcatagagccctgggtcaaagcaaagtcattccttccaactgtgatgtgccaggctctgttcaaggcacacggtgcagagctggatgaaaacaaagtttgctaacctggagctcacattccagcaggagagtcagaggaaagtgggcaaaaagcccccacataaacacatcattaattttaggtgttaaaaaaatctttcagaaaacaaaagaaagccgagtagaggaagaggatgagatgagggtgctgcttcacagggtggtcagggaaggccggagacatctgggcagaatgagggaggggttagcacagtgggcagcaggggacgagcattccaggcagagagaatagcgtgtgcaaaggcgctgaggtgcagacaaacttgagaaacagaaaagggattgcgtagctgagctgggacagagggaggtgcgtatagtcccgggtgtcgcaaagtgccaggtgccatgctaacaccacatcgattaacaatcagacatgggaggaagggacctttccttttttcttgagacagagtctcactctgttgcccaggctggagtgcagtggcatgatctcggctcgctgcaacctctgcctcctggcttcaagtgattcttctgcctcagcctcccaagtaactgggattacaggcgtacacgaccacacctggctgatttttttgtattttcagaagagacgaggtttcaccatgttcgctaggctgattttgaactcctgacctcaaatgatctgcctgccttggcctcccaaagtgctaggattataggcgtgagccaccgtgcctggccagaagggacctttctaacttccttttccggataaggaaactggggcacagagtgattaactcacccatggccacacagctggtaagcagcgcagctctagagacagttcccaacctctatttttttttgagacagggtctcactgtcgcccaggctagagtgcagtggagcaatgcgcactgcagcctcaacctccagggctcaagggattctcctacctcagcttcttgagtagctaggactacaggtgcaagcaaccatgcccgactgatctttgtagagatggggttttgccgtgttgcacacgctggtgtctcactcctggacttaagcgatcctcccacctcgacctcccaaagtcctgggattataggcatgagccactgcgcccggcctcaacctttatatcgtaagtagctcacactgaccccagccaaactctgcattcagactcatctgggttccaatctgctctgccccggccagctgtacctgctgaggaagcagcttcccctctctgaaccacagcatctccatctgtctggggagctaaggggtccctactatgacaggttgtcctgaaggttacataaaaaatgacagtgagggttcccactcctgggtgcacttcatggaacaatgaggactccccagccccaggcctacatctgtaccaaaatggggacaagggttgggggggagaaagagacctcaggatatttttcagctcttcagctgattctgatgctcacacagggcatggatggccaagacagatagtgccactgcagggctgtgcatggcctttggtatgaacttggggtttaacaagcggtggccggcattacaatgaggcagcagagtgtggtgggcaggggagtctagagccagtcagcctggctagaaccacaatgctgccactccccacctgtgtggcctgagcatggcattaaaaacaaataagaatagtagcagcagttaccgtgacaacatgctggtcataatcaaggccagaccctgggctaagtgtttcacatcctcagaagagagacacagaaaggctaagtcacttcctcaaggtcacacagctgagagaggtggagctgggattcctagccagtcctcaatactgtcccacctccccgctttacttttctcacccaggaaaccaggataacaacagaatctactcccagcagtgttgtgaggatttggagcattgcgtcagggaaagcccgttgctgagtgcctggcacgtggggaagagtgggtggaagaacatgcttcctctcatcactgtgcccccatctgagaggtgaggaaattggagagtgggaaagtttgcctgtctcttggaggcagccattggagacagagg[143 bp omitted]aaattaaaggggtttggaataatccctgctgttcagcagaaaggacaggtgggttaaaaagtatgacgcagtgagtccaaaatctctttgatgtcatgcctctacaaatgaaacagataacgacaagaaattctttcagctttaacatttcatgattaaagtttaagtctaacaaaaaagtgtctgtctctattaaaaatacaaaagtagccgggcatggtggcgcatgcctgtaatcccagctacctgggaggctgaggcaggagaatcacttgaacccgggaggtggaggtcgcggtgagctgaaatcgtgccactgcactccagcctgggcagcaagagcaaaactccgtctcaaaagaaagaaaagcagtcgtagtatcacttgaaatagaaaacagaactttatatacagtaggacactgattttatttggaaaacatatttataaatacacaaacacggacacacactcaggaggcacgatatggcaatggggaagaaataactgctaggaatcaaaaacattccttagggtcccaggcctggccctacccccacctccctgtgtgacctggcgaggcccgacctaacctctctgggctaatcatgtcaatgtgtgtaaaatggctaaagtgctcccttcctccacaggaatactgcagagaggacgttaacgtgctatttaacctccttgataaggtctcaattgggggtacaaaattgatgtcaagaatcctccgaacacttttttgttagacttaaactgtaatcatgaaatgttaaagctgaaagaatttcttgtcgttatctgtttcatttgtagaggcgtgacatcaaagagattttggactcactgcgtcatactttttaacccacctgtcctttctgctgaacagcagggattattccaaaccccttttccgttaatttttttttagctttcaggacatcaagaattcaagaggggatgaagtccacgctgctaacaccatcacattgtatttgaaaacacaatctttagaggaaaaaaataacttcagatggatatatgattatgtaagaaatcaggctggccgtggtggctcatgcatgtaattccagcattctgggaggctgaggtgggaggatcacttgagtccaggagctcgacctgggcaatgtagtaggaccccatctctacaaaaagtaaacaaaaattagcccggcatggtggtacatgcctgtagttccagctacttgagaggctgaggtgggaggatcccgagcccaggagcaccactgcactccagcctgggtaacagagcaagaccctgtctttaaaaaaaaaaacaagaaacaaaaaacaaaaaacccaaaaaacctaagttctataaagaggaatttttgtctgatttgtttcctaccagatctcaggcacctaaaatccagtagctaacacgtaatcagtcctttgtaaatacttactgagtaaataaatgagtccatgattgactagtgaaaaaaaaaaatctgaaagtgctcatttaaatttctttcatggcagatttcctgggcttcctaggggccagccccagtgctgggagctaggcaagaagactaagaaggctgggacctcccacagccctggctctgtgggaaggagcttatgtctggttagggaggctctttaccatgtgacaagacataaaagacagtctgactcaagtgctggggacacgcacctcctctcacacatgaagggagaggcacccggcttccctaagcaggtgcaataggagttggggcctgagggaagcctgctgggcagggtgggttagggacagt[131 bp omitted]ggccaacatggtgaaacccggtctctactaaaaatacaaaaattagccaggcttggtggcgaggcacctgtaattctggctacttgggatgtggaggcagaagaatcgcttgaacctgggaagttgaaggtgcaatgagctgagatcgtgccactgcactccagcctgggcaacagagtgagattccatctcaaaaaaaaaaaaaaaaagcagggaggaatgacagcacgtggggacatggtgtgcagagggagcaggaaaaggctgcagatgccaggaggctgcaatgtaaggtggacagggctggctcatgagggcactgggaagcccagcatatcctctatgctggggagaatcgcagatgggttttgagcatggcagagatgggggggtgacctcattactttataggatatttatccacccacgcatccaatcatccattcagccagtcttcagtgcggcctcctgtgtgcatgttagatgtcgtgggaatcagcccagacatctcttcaaataattaacaaaattacagtgaagcaattaattgcttaacaacctattcagtgtcccacagccccagcacactaagcacatcacgagggctggggcagggcggccggctctctatggttcatcctcgtgggccgcccagggctggcaaagaaggggtgttcagtgaattttaaggcagagtagacgcgcct[140 bp omitted]tgaaactgtgtctctactgaaaatacaaaaattatctgggtgtggtggcatgcacctgtaatcccagctacctgggagaatcgcttgaacctgggaggtggaggctgtggtgagctgagacagcaccactgcactgcaggctaggcgacagagcaagactctgtctcaaaaataaaaaatctggtgagttcagagccagaggaacagagaggtaggaagtgaggccagagagggaggtggcagccagtggccaaatgggcttagattttctcctgacggctctggggaaccctagaggggcagagtcaactctgggtgttagaaagatcccccaggctctacggggatcagactgaggatgaaagactggaggcagggtcagagggtggctggggccacggtcagcaaactccgaccctggaccgtttctacaggttctgggatctaagaatggttttgcaacaggggccaaatgtgtcccataaagcctaaaatatttactctctggctctttatagaaaaggtttgccaagtcctgcaagaggaggaagcctgagctgggggtggggctgtcggaatgcagagaagggaacacatcccgaagaacctttccagacctggacactgactcacccctcagcagctccctcctttcctggagcccctggctcctcttccttcacttcttttttgactgctggcttccggggggctaggaatgaagacagaaaacagtgggtcttttctccttccggtagcccccacctcccatccattctgcacccagcaccaccccagtgctcagggagatgggagacaggctggtagagacaaggccgactttccaaccagcaggaaaggaagaagggtcttcgcagcatctcaggcctctggagagaggctcaccagcctcctgcctgtacaaccccgggaggtggggtgagcaagggaaactcactgaagaagctgctgagcgtcttgggagctctgcggggaggcttggtctgctcttcctcctcctgcagttcctgcttcgtggccacctcaggctctgaaacgctttccgtcggggtctctgcttctgcggtgagagagctcagacggtgatgcaaactctttgaccctgagactttttttttctttttttttacccccaagatcattctgaccctgcagatggaagatataactacacctacccttttcctttctgttagctttgagctgagatctcaggcctgctgtctactcctcagtgctaactagcggaattctagcacttggcctgaaataggagacttaggaatagtggtaaaaagaaatctcatcgtcatgagaagaaaatattcccactcctcccagcagctgcagaaaatcagatacaactctgtatccctaaaattctcccggcaagtgttgtttctaacacaggggcctcatggacacttggaccaccctgagagggtaacttcagcctctaaaatcctgtaactcagtttggttgtctaacttaattaataacatttaatttacacctatgacttctgaaagctatgaatactttttatcttttactttgtctgaggcgggggagttcttgctctgtggccaaggctggagtgcagtggtgcgaccataggtcactgcaacctccacctcctgggctcaagcgatcctcccacctcagcctcccaagtagctggaactacaggtacgtgccaccacacccaggtcatttttgtattttttttggtagaaatggggtttcgccatgttgcccaggctggtcttgaactcctgggctcaagtagtccacccacctcagcctcccaaagagctaggattacaggtgtgaggcaccgtacccggcctaggaagattttttaaagaatggctggctctttcctcctttcccacatgcatggggaaaaataataattaaaaaaaaaaacccgagtaataaaaactattattcttctagattcggcatttaagcaataagtttgagaatctatgccttgtttaaattaatcatcctccaaagacttctgaccccaaaatcaggaggtggggcagggcggaggagaggaccagaaactcactggaggtctttaggggcttgggaggcgtggtgggctggtccccgtcttctccttccttctctgtggccacttcagcctctgtgaggctttctttcggggtctcctcttctgacgatagacagaacggtcagatggcaaaaaaatcccattgaacctacaagggcattttgactctggagacagtctgccctcatctgtcatctgttcttttttttgagacagagtttcgttcttaccgcccaggctggagtgcaatggtgtgatcttggctcactgcaacctctgcctcctgggttcatgcgattctcctgcctcagcctcccgagtagctgggatgacaggcgcccaccaccacatccagctatttttttgtatttttagtagagatgggatttcaccatgttggccaggctggtcttgaactactgacctcaggtgagccacccgccttggcctcccaaagtgcaggtcttacagttctatcttgtgccaatccaatgtgcctgtaaagcagtgggccacgtaagaccctgctccttgtcaaccccaagcaaggcagcgaccttgagggggtccagcccgtttgcctatgtagccgagacataaatggtgtgtctttccttaccaatgattcctttagtgttattcaccccaaaatagaatctgaaagggttaaaaatgcaaatgacagcctgttatagacaaaaataaaaatcttcaaagttaaaaaaaaaatcttacctctagggtcacaatacaaactacaaaaaccaacttgggaaaaatctgccttagtagaaagaggccacccccgccacccctcactggacactgacagtggctaaaagtgtagtttacaataaaatttgtactaaaaattgtcaataagaaatcaaatcttttttttttgagacacagtctccctctgtcgcccaggctagagtgcagtggcacaatctcggctcactgcaacctccacctcccagtttcaagggattctcatgcctcagcctcctgagtagctgggactacaggcgcatgccaccatacccagctaatttttataattttggtagggatggggtttcaccatgttggccaggctggtctccaactcccgacctcaagtgatccacccgcttcggcctcccaaactgctgggagtacaggcgtgagccactgcacctggccaagaaatcagatcttaaccaaatttaaatctgccctggaaaatggaccttttatttgtttgcagaaacaaaaaaccaaatgacgttaaaggctgcaattggtgtaatctcatgcaggccccagatgatcaatcgatcagatctttatggctgttttcggtgggttcaccaacatgcagggaactcactgggcgctgcaagatattttagatttttcaaaggaaacccagcgacacctgctggccagtgtgtgaactactagttcgaggtatttcagttttcagtattaaatcacattccttgcaatgacattgcatctctgcaaagctgggttttcataggttgctgctataaaaatcaagtactgtacaaaaatcaacatagaacaggaaatgacgttggcagttttcaattgaattccactgtttaagatgttacagagtatccaaggcatttcccacaagtaattatggttatttaagaacaaaatacaggctgggcgcagtggctcacgcctgtaatcccagggctttgtgaggccgaggtgggcagatcatgtgagctcaggagttcgagaccagcttggtcaacatagtgaaaccctgtctctactaaaaatacaaaaattagctgggcgtggtggtgtgtctgtaatcccagctactcgggaagctgaggtgggagaatcgcttgagcctgggaggtggagactgcagtgagcccaaactgtgccactgcactgtagcctgagcgacacagtgagactgtctcaaaaaaaaaaaaaaaaaaaaagcacaaatattactttttttccaatgtatgtatagtatctaatagttgtttggacataactacttaatagaactgataaggtattggcctaggagcatcataaaaaaattactaagacatcaagggtgctgtgaactaagaatgtttgggaactgcaactttatggtaaaatttacaaggaaaaggaaatcatttagaggaaaaatagtttccattaaataaatataaaaatagcaaataaaaatgggaaactgtgcctgaattattactaaattaagatgtccaaacaaatatatcccacaatgttttcagaacaaaagttcccatattggtaggtggaattcctggatgcctggacacaggcatcaaatcggcagggtccaaacatcctgagctctcaggcccctgcccttgcagatccaaaacacacacacacacacacacacacacacacacacacacacacacacacacacacctctccttctgggggctcaccttcctcctcctccttcctcttggcttcacacacacacacacacacacacacacacacacacctctccttctgggggctcaccttcctcctcctccttcctcttggcttcacacacacacacacacacacacacacacttctctccttctgggggctcaccttcctcctccttcttcctcttggcttctctgtcctcgtcctcactctgctcttccaggacttcctgaatggtccgtttcgggagctgcttccgagctggggaggcaaagggcttggtgtatctgacctcgctggctcgtgtgctcccatcccggagagctcacacccactgatgtagcctctggaaggctctgggccctctccccttctctgcctgcacacagtcactgccccagtgcaggccgcacccttcaatccctcctgcttcctggctgtgtgaccttgggcaggttacttaatttctctgtgctttgctctctcacgactgcagaatagaaataatccccacgagtaaacaatgatgtaatgtacttggcacagtaccgattccagcaggtcccctgagctccccactgctcccctcagatcttaactgcctccaagtgttccagacagcttccccggaacctcagaagtctggaagtggcagggaataaactagccccaggagaggccctcaccccacgatcggcaggagttggtgtataaataccccagctgcctcgcatctcgggggtcactctggagcatttacaccgttccccagagaatcccacaaaactaagctccagctgcccaacacatagcagacccaacagcacatcctgtgttggctgctcccctgtcctgaatcaccctctgttccctgcacctcctaaacaaaccacttgcacttgaatccctgtttcagagcttcagaacctgcttctaaaagcctctaaactcagatactaacccatgatgaagagctcacacaaaggcagttgtacccatcttcactgttatatctcatgttggccattgcgccacctggtccccggtctcccggcccccagtggctccttcacgtggccccagagggaccttctatcagcatggctggcactgtctctccctgctcaaaacccttccatgactccacattctctgctttatccaggataaagtcttttgatgtctaccccgatcctacctaatctctctccatctgaccttctaacccttcccacaccacatactccaccttcttttatatcactgctaaactggggtgtttccagacacaccaagctgtgtcacccctccaggcctcagcatgtgaggtttgggacatagctcaatgttgctccctctgaacaagatcccctgacacacccccagggccaacctcagcgtccacctggagctcccagcatgccctcagccacactgtgacttccttatggccacctttcattcagggatgaacctgcctccccacctcacagcccttccatggctcccaggacccacagcacgaagcccaggctccttagctgggagtgcaagaccttttgagatccagcccccactctcctctctagctcacctctcaccacgtgctatcctcaaactctccctgcttcccaggtcgcatccgattctccagaaacaaggaagtagatgagaggccccaaacatcccatgctgttcccatctcgaggcctctgcacgtgcccttcttgtctgaaatgcatgcatctgtcctttctcaacatggccaaccccaacccatcttctaagactcggctcagccatcacctcccctgggctgcttgacttctgagctcccagagtaccctgcgtcacccagcatcgtccgatggaaagatctggcaagccacgtatgtaaccttaaactttcttgcagccacgttaataaaaagggggaaaaaaccaggttgaacttggtttgaagagtctattttgctcaatacatctaaaacagtatgattccaacattctgttttcatgctaggtcttcaaaatccaatgaactcactgcacatctcaagttggacaccagattttcatcggcaacatgatctgtgtaggtttcataaaatgtacagctattcacataccaaagctgttccaaaatgatgtggaaaaagtgcaaagtctttacgcactgaatcacatattagctttcaaatgtaaattcaactgaaaggatctaacatgaaagattcagctcccctgtcacactcaccacgctaaagcgctcaataggctagaccggacggcaagggctcacactgccccgcattacgaatgggtctctcgccctgttcttaccccacagcaaacattccaagtcccccttaggacaaagacgctgttccccaagctggttttccaggaccttctcacctcattgctcaccatccccaatcctgcgctctacacgccagcacaccaggccctcagcagcccccaggccttctcaatttctatgttccccttgcctagcatgctcccctcctcctttgcttgttgcctcttctttgtcctaaagggctcagcttggttagcctctcttctggaagtctcccttgagccatggccccgcgcttgtgttcccacatgagctgtgaggcctccatctcagcgcataactacagtcacaatgacccacaatgactgagccccgactgagggctgggcccagttctgagcagcgtacacgtgttatcttctaactcagatatttctgtgcggtaggtgctatcattatcatcatctctacagataaagcaacctaagctcagagaaggtcagtcatttgtcccaggtcatacagccagtggatggtggacccgtgctcttaaccacaacactaagaccagagctgttgtaaggat[226 bp omitted]aaggcaggagaatcgtttgaacccgggaggcggaggtcagtgagccgagatcatgccactgcactccagcctaggcaacagagcgagactatgtctcaaaaaaaaaaaaaaaaaaaaaaaagagaaaaagaaaggcaggcgactgaaggggcaggggcccgtgtgttctcacctgtgcgacgcttcggaatccctgatggggaactgtccatgggagaggtgtcagagagggaagcattgttctcaggagatgtggcaggacggggcggggagacctgtgagcagtccagggcaggcttctggaagaggaaagaacagttctagagtgagcgggggaaggagggactccattttccaaaagttgagagtagaggggactgaaacctctctgtctaccctcctttctgaccctatggtctcagccctaactcaggggtggcctcttctcacctgggccatcatcccgccctccagtgcaggatcatggtcccatcaaggacccccatagctcttctgttttctacagtaacagaatcttcgattctcctgcttc[132 bp omitted]t[135 bp omitted]gcctcccgagcaactgggataacaggcgcccgccaccacgcccagctaatttttgtattttttttatagagatggggcttcaccacgttggccaggctggtctcgaactcctgagctcaagcgatcctcccgccttggcctccagagcactgagaatacaggcgtgagcccccgtgcccagccttctctccatacagtttagatgtttgttccctccagatcgcatgttgcaatttggtctccaatgttggaggtatgacctggcgggaggcattcaggtcacgtgggcagatccctcatgaatggcttgtaccctccttgtggtaggaaccgagttcttcctctcctggttcacatgagagctggttgtttaaaattcctctcttgccatgtgacacacctgctcctccttcaccttccaccatgactggaagcatcctgaggctctcaccagaagcagatgctggcactatacttcttgtatagcctgcaggaccgtgggccaaaataaacctcttttctttataaattaactggtctgaagtattcctttatagcaatgcaaaatggactaacatgcatttcctggttcaaataacatccacttaatgttgagtggggtgccctcctcttcctgttggcagaatatggatgttcacagggacaagggcatctacagagagcaaacgacagcacagaggaagcctgggcctctgaccctgtgagacggtcacatgaatcccggactctgcactcaggagagagaaaaataagtttgcgtcttgcctaagccactgctaccgtgtctcggtttcaaccactcacttatcttcttacagggccctgtgccagttattaagtgattttctctcagctccaaacctgtcactgtccagtctccttcatgctgccaggaccgggactccacaaatcttcttcttgctctggcgccacctgggcatcaggcagtgccaatggagggaagcagagggcactgcatgactggaggcacagccggcttgccgggggcagctgctggatcccactgacagttttttctaacattcacggggcttgccacgtggtacctgatcagagaccctggcatctcccacccagtgctcccttcctgaaagatcagagttgcaggctctcggggcaccttctctaagctcagagacctgccagcagtcccaccacagaggtgtgaatttcagctcaaaagccacagggatggtcactgcaccccacagttgctacctccatgatgccttagagttagttctctttttagcccttcagttacctatttaacaactgcatacctagtgaccatcctttaaactccctctgttcaaatcactggtatggtttctgtctcccattgagaccctgatggagatacaggtctcagataatttttttttttttttgagatggagtcttgccctgttgttcaggctggagtgcaatggcacgatctcggctcaccacaacctccatctcccaggttcaagcaattctcctgcctcagcctcccaagtagctgggactacaggcccgtgccaccatgcccggctaacttttgtagcagagatgaggtttcactatgttggcctggctgctctcgaacttctgacctcgtgatccacccgccttggcctcccaaagtgttgggattacaggcgtgagccatcatgcctggccagatgaatattttaaacactgcccaggactaaatgatctctgcctctcttctgcccaaaactcttcctagctccccagaagcctcagggtaaagtctaagctccaaaagagatctctattctaatacctggaacctgggaatatgttaggttacatggcaaagggtaattgaggttgctaatcagctgaccttccgatagtgggattaccctggactatccaggtgggcctgatatagtcacaggggccttcaaagtggaagagggtggcaggagaggaaagtcagggtgagatgtggccacagaagaaaggcacagaaggaggcaatgccacttgcttatttatttatttatttatttattttttgagacagagtcttgctctgtcacccaggctggagtgcagtggcacgatcttggctcactgcaagctccgcctcccgggttcacgccattctcctgcctcatcctcccgagtagctgggactacaggcgcccgccaccacgcccagctaattttttgtatttttgatagagacatggtt[143 bp omitted]ggaaaaggcaattcctggattctcccccagagcccccagaaatgaacgcagacctgctgacaccttgagtttagcccagtgcaacccatttgagactcacgactcccaaactgtaagacaataaactgacactgttttaagccactgcgtttgtggtcaattgttatggcagcaaatgggaagctaacataggtggtgaggaaagtttcgctgaggaagtgatatctgagcaaagcatggaagaaagcaggggactgagccaggcgtgtatctgggaaagagagttttaggctgggaaagaaggtagtggcccagaggtggaagtgcacctggtgggtgtgggaagccaggatggagcgagctgaggaggagctgtggatgcggctgcagatgtgatgggcgggggaagagaggagcagcaggaggggcctgggaggtttccacaaggcctggctttggcctgtggtggtaataccagggggtttgggcagggagtcacaggacctgacctcaccactgacagaataagcagcaccacgctttggacatcatccacaaagcaatgaacaagcattaaatgacttaaacaggggaagagagtggtccaatgtatttggagaagttaaaaagccctctgaccacaggagaggctagatatacttttgaacccttatttttttgcttttttttttttgaagcaaggtcttgctctgtcaccccggctggagtacagtggtacaatcacagttcactgcagccttgaacacccgggctcaagcgatcctcctgcctcagcctctcaaggagatagcaccacaggcatgcaccaccacacctggctaatttttaaaacatttttttgtagagatggggtctcgctatgttgcccagcctggtctcgaactcctggcctcaagtgatcctcccacgttggcctcccaacgtgctgggattacagacgtaagccattgtgctgggccttgagcccttgttttaccatcaggcattattctcagatctgtatgtaaatcgactcatttcatcttcccagtcaccctatgaggaaggtgttaccaggagctgcatgttacagttgaggcatccaagacctaacgtggtgaaggagcccacccgaggtcctagggcaggggcaattaggaccaggttgtgtctgcccccgacacaaccaggaaacacatctacctctcccgggcaatttctccagaattctcctgaacagctgctgcactctgttccaaaggttaatgggaattagtttcttctggtaaaaatgggcagggtgatggggacctacctggcctttagcagggctaagggcttcatcctcctcttccccttcgctgcccaggacccgggccgccttcctccctggcctcttcaccggagagtcactctcggacaccactccattccactccttcagtgccgccctggaaggtggggaaatgggggtgtaaaggggcgactacagcaggcagagtgggggcactgcccgcaaacactttggtttctttgctgtttccttcccttcctttcaagcatccaatgaacattttctggttgtctcctcagcaaatctcatcatttcatccatcagtgcattaatccacccgcccactcatccactcacccacccatcacacatctctggaagtctccagagtgcctgccctgtgatgggtgatgctgaggagcaaatggagtccctgcctaaggttgccattggtctccagcatctattgggatgcctttttttttttttttttgagatggaatcttgctctgtcgcccaggctggagtgcagtgggccgagatcacaccattgcactccagcctgggtgagagtgagactccatttcaaaaaaaaaagagtactgttgtcttctacttagatgagacagcatcaagacgtggccagtggccagcggccagcttctctgcattatggagaatgtctggttctagaacgaggccaagacctgcagaaacagagacgtacagacaactccgaggccctggatccagctgtgcctgcagctgctcttgctcttggacttctggccacctggctgaaaaagttttttgggccccaagacattttgcattaggtttgaacacttgcaaccaagacaatcctgactgctaaaggaaaaaattcaccatatcccagccctgtgacatactttggagggggctccgtctctctgctgctattggatgcctccttctcaggcttctttgctttaccctctttcttggggtggaaaaatgacctagaggagcataaaagggggtaaaaaaagga[138 bp omitted]ctcctgggtgcatgccattctcctgcctcagcctcccaagtagctggaactacaggcacccgccaccatgcccagctaattttttgtatttttagtagagatggggtatcaccgtgttagccaggatggtctcgatctcctgaccttgtgatctgcttggcctcccaatgtgctgggattacaggcataagccaccgcgcccggccgcatcctataacttctaacaccatttccatctcagcacataacagagaatttcaaataagccctttaacttaactgataaggaaactcagactcagacaaaggaggcaacactaatttttctgccctaacgcacctgcaagatatgatacatcccaagttttattcaacaaatattaactatgcactttttaaatcttttttttttagacagactctcgctctgttgcccaggctagagtgcaatggtgtgatctcggctcactgcaacttctgcctcccaggttcaagcgattctcctgcctcagcctcccgagtagctgggattacaggtgcccaccacaacgcccagctaattttttttgtatttttggtagacacgggttttctccatgttggccaggccagtctcaaactcctgaccttaggtgatccacccaccctggcctcccaaagtgttgggattacaggcatgtgcccccgcgcccagcctaaaaaaatttttttttttgagatggagttttcactcttgttgcccaagggtggagtgcaatggtgcaatctcggctcactgcaacctcggcctcccagtttcaagtgtttctcctgcctcagcctcctgagtagctgagattacaggtggccgccaccacgcccggctaatttttttcatttagtagagaaggggtttcaccatgttggtcaggctggtctcgaactcctgatctcaggtgatcctcctgcctcccaaagtgctgggattacaggtgtgagccactgcgcccggcctacctaagcacttattatgtgccagggcctgttctgggcctgaggggtttggcagtgacccagacacacgaagttcctgccttcaagaagctaacactctggtgaagggcagaaatattaagcaaacaactaaatataaaatgttggggcctggcatggtggctcacacctgtaatcccaacactttgggaggccgaggtgggcggatcacgaggtcaggagatcaagaccatcctggctaacacggtgaaaccctgcttctactaaaaatacaaaaaaaattagctgggtgtggtggcaggcgcctgtagtcccagctactcaggaggc[170 bp omitted]aaagtatggagttcagttaagagtaatgtactgacattagtatctcagtggtgagaaacggatcatagtaatgtatgatattgacaatggaaactggccaagggtatacaggacctctctgtactgtctttgcaactttcctgtacctctaaaattattccagaataagaggtttatttaatcttcaaaaagaaaaggaaaaatcatgcaaaagccagtggacagaaagcaatcgaaggcaccatcagccctggagagacaatccccagattcctcatcacgggagaaaaacggaacccagcatttgtgtaagccactaccgcccaggtttctgggatggatgcccttgtctgggtctctctaccatccattttttcctcctggtaacagcccctccgttttcctcttgggatgcttcttaccccacattctctcagtacacacgatttgagtgggctggcccttttgcctgtgaccaggggtggacacgtgatccaggctgcatccctgtggctggttcagggataggtatgtggcccaggctgggccagtgaaactgggctctaacaccctctttccaaggggaccgctaagaggggagagcccgcctgagggtgaggacaacctcaaggacagtagagctgaacaatggagagagacagattcccagggaggaagttttggcaactggatcgaaccaagcctgaggctgtttactccagcaggtttcaatgatataagtcaagtcatgccctttcttgtcttcctgaagccggactgcattaacacgaggtttctcaacctagacactattgacatgttgggcctgatggttctgtgttgttgggggggctgtcctatgaattgaaggatgtttagcagcatgcctggcttttagccactagatgccaatggcaaaccctctgtccctaggttgtaacaaccaaaaatatctccagacactggccgggcgccgtggctcacgcctgaaatcccagcactctgggagg[135 bp omitted]gaggcaggagaatcacttgaactcatgaggcggaggttgcagtgagccgagattgcgccactgtactccagcctgggtgacagagcaagactccaactcaaaaaaaaaaaatctccagacgctgccagatgttccctggggagcaaaattgctgctgactgagaaccactgcgttagggtttctgctccttgcaactaaaaactgttgttcaatacactgtcttccatatcccacggctcattttccatactacttgactcctggaaattccaactcaaaatctaacgtaagagtttttgtttgtttgtttgtttttttaagtacagatttagagaaagaaacagaggacttggagaaggaaagactcaggggcaagggagggtgctcacatgatacttcgctgcatgttggcgtcagaattctcccttcctgtccagcacttttcttcgtctgtcagctgctcctggaacagaaatccaaacacttgttgaggtgattggttgtgcagagatctaaacacacataaaaccctttctttaagaaagaaagaaaaaaaaaaacagaaacatgaatttccccttcaaaaagaaactcctgtttttatgaaccaaaataatttgctggtgagatttactggtgcagaataaaagctccaaatcagagaaaaagataagaggcctcctttaccataagaagactgtttttcatctaatatgaggaatagactgaggacctgaaatgggtttttttggagttaagtttaaaggttagtgaaaaattgttttaaggtgatgacataattccgtgaaacaactgtggaagcttataaaattgtacccgctggtctacataaattagctcttgggcagtttctaaggtatgctgttatttcaaacaaagggcagaatatcacagagtgtgtgctactgaactgtgtaaaagagaaaggctataggtcaggcacagtagctcacgcctgtcatcccagcactttgggaggccgaggtgggtggatcacttgaggtcaggagttcaagaccagcctggctaacatggcaaaaccctgtctctactaaaaatacaaaaattagccaggtgcggtggcacgcgcctgtattcccagctactctggaggctgaggcaggagaatcgcttgaacccgggaggtagaggctgcagtgacccgagattgtgctactgcactccagcctggacaagagtgaaactccatctcaaaaaacaaaaacaaaagaaagactataaatgtatccacatatcttgtatatgtacagaacatctcagttggaagacaaaaaactggtaatgctgtcgcctcaggagggacagacgctggagggagattttttaatatgcatgcttttgcaggcagaacaattggaatacgttaccccttcacaatatatttttaaaaattaaatacttttttaaaaagtctgttatttaatgaaatcaataacagtcactggggcttccacagtttagagtaactctaatgaaagggttcctaggccgggcgtggtggctgctgcccataatcccagcattttgggaggccgaagcgggtggatcgcctgaggtcaggagttcgagaccagcctggccagcatggtgaaacctcatctctactaaaaatacaaaaattagccaggtatggtggtgcacacctgtaatcccagctagtggggaggctgaggcaggagaatcacttgaacccaggaagtggaggttgcagtgagatcatgcactctagcctgggcaacagagtaacactctgtctcaaaaaaaaaaaaaaagaaagaaaaagaaagaaaaagaaaaagaaaagaaagggttcttaatctggggtccacaaaacccaggagtccaagagcagaactcaagtggtctatgaaatttgacaggaaagaaattacgactttattcttgtaaacttctaattggaactgagcctttccttccattataaatattaaagatataaaaaattataaattttctatatctttaatatttataatggaagaaaataaattacacattataattatgtaattataattatttacattatatttccttccactatgaatatattttttaaaaaaggactagcaggacctctgcgtggattgcttgagttgagaccagctcagaccagcctgggcaacagaaatggttttctttgactttcccttcctttgcacagaaatcttcttcaacccatggggtcccctttcgttttctggaatcagtactctctgtcccgcaccacacgcctctaagtctccactactctctacagccttggccgccacatgttggcaccacaactcaaactcaattttggaatcaaaaaactcagtaggccggcactgtggctcacgcctgtactcccagcactttggaaggctgagacaggcggatcacgaggtcaggagttcaagaccagcctggcccgcatggtgaaaccccatctctactaaaaatgcaaaaaattagccaggcatggtggtgccagcctgtaatcccaactactcaggaggctgaggcaggagaatcacttgatcccaggaggcagaggttgcagtgagctgagactgcaccactggactccagcctgggcgacagagcgagaccccgtcttaaaaaaaaaaaaaaaaaaaaaaaaacaaacaaaaaagaaactcagcaatttccaaacagagtttctcagggccagttggggagcaggaagtaagcaatgcttcaaccaaacagttcacacagaaagcaggttagggacttagccaccaaaatcctgagggcaaaggagaaaactattacgatccctcctgagtgctcaactgcctaggtacttgacattctcaattatactgactctccacaacaactctgttacagaaactaaggcacagaggggttttcaaaggaacttaacctgcatctatagtacgttccaccccaggtcggcctgctccacagctcacctcttaaccaccagactgagttgcaagggaaggagaaatacataagcgtttactgggaagcctactctatgcctgacaggctgatcacattctcaaataccctcaatcctcaagtcagccctccaagacaggtgagatcatccccactttatagatgaaggtaatgaggacagaggaacatagctggggttcaggcaaggcttcaaaacccggtgtggctggctccaaagcccacgttcctttctccttaccacggtactcaaggctggcttctcaactctgtgtactgctgagttggggggaacaaactggttgatgcctctggaggaccacctggcgtctctatcggaacggcaaccccacttctgtgtatttggcccacagagaccctcacaggtggaccaagtgaggcacaaagttacctgctgcagcactaactgtaatgagagaagactggaaactggtggaatgtctacccttagggaactggttccctcattactggaataccatatggtagaatattgttcagggttaaaattaaatgaatgatggataaaaggtataggagttttttggggggatgataaaaatatcctaaaatcgattatggtaataactgcacaactcagcgcatacactgaaaaccactgacttgtacactttaaatgggcactttaaatacactgaaatacactttaaatacactgaaaaccgctgacttgtacattttaaatgggcaaaattgtacactttaaatgggcaaactgtataattgtgaattatatctcaataaagcggttaccaaaatgaagagataatgacaggaaaaatatcaagtaaggatgaaacagtactcagtaataaaaagaaacgaagcactgatacaagcaacaacttgggtggacctccagggcattgtgcagagtagaaaaaaggtaacatcctaataatatatgattccatttacataacaatctccgaatgacaaaactagagatggtgaacacattagcggttgccaggggcctggggaggagttcttatgtggagagggaactgttctatatcacaattacgatgggggttacacaaatctatacaaggaatcaagctgcacgggcacacagatgcacaatcacactcacaccacacaaactggtgaaaactgaacaaggtctgtaatctagttaacagaactgtattgatgtcaatttcctggtttcgatattgggactacataagatgtcaccattaggggaagatggatatactcttttcacaacttccttgaatctataattatttcaaaataaaaagtaaaaacaagaggtaagctccatccctttatcaagcatacattaggccagacgtctccccattcagatgattctccatcttttacgagccctttacctagacctggaccttaccactgacctctccctgacaccacccatctccctccagtagggcccactccttccaggtgatgctgctgcccgcgatttaccttcttctagccccgccccctcagcacttccaggtggcccccgccccctcagcacttccggttcccagccagccccacccttggcacctcccccttccaggtggccccgcccacacgcaatcttttccccggccccgccccttagctcccttcagcccctccccctcccagatagccccgccccctcggggggccttccgatttccagctggccccgcccacacagttttcccccccccggccccgcccctcagttccatttggcctctcccctttccaggtgaactcgcacctcaaggcctcttctcagaggacctgtccaactgtctctgtctctcgtctaccctctacctggcccccctccctctgggagacacctctctgcactctccggcggcccgcagcccgcgctcttccgtctccaccgcgctctcggcagcctcagcgtccccacgcccactcctctgcagacaccccgacatggcgaagcataggccccaagcattcggcgcacccgccgccctccgcctcccatctgcttgcggacggccccacttgccttgcgttggtcccgcgcgccgctgcccgggcaacacactcagatccgccaggcgcgcctctgcagtcccaagttcgcgccacggcattcgcgcgcagacgtctgcgggcgggggcggggcagagcctaggggcgggacctgggcaccgtccgcaccgccgccgtcgcgcggaggacactgggagtcgtagtctcccgaatgggaggagggcgggaaaaggggtgaagtggggcgagccctcccgcagagcacactgggaaaatgcccgcgctttccctcgccctggatgagcgggtgtggctgagggtctgaggagtgactggcagggaaagaggaggaatcggtggaagcgcccccgcgaggcacggcgggaagagaggcgggagaccgcgcggggcatcccgggagcaagggccgggccaggcctgggcgcggggcattgtgggaggtggacgccgctccggggcgggtaggtgagtggggaggggcgggaagggtgcacatcttggggaggggagaggcacagctaggtgggacggcggggctggaaggtgccgcagcgggcggggagggggggagtaggagggtcgggagcgggctggatggggctgctcgaggggagacgcgcagctggacgtggggggagcatctggggtgaaggagcccatccgaggacgaggggccatgtctagaacgaagatgcatattgcgggggatggtggatgtaactgggaggaggggcccacagctggactgggggccgcatctgaggaggaggggaccacaggtgaatactggtgacacttccgaggagaactagccacaagtggggcacacacctgtaggcgaagcgtggataactgcatgtggggagtacatctggagatgagagtgtctcagggaagccccagctacagctgcatgtggcgagccatagggtcataatcgggggaaggggcaacagctgcacgccagaggcacatctggggagtgcggagccacaggtgcatgaagcatgtgaccgggtgaggggtccgtggcctggatgtgggagcacatctggagatggagcgtctttggaggggttacagccaactgttggcacatggaaggaggagttccagatgaatacgagagttagaagttactcttgggtgagagacacagctggaaggggaggaggttttagctggaatttgagaacacatttgaggagatgtccttaagggacatctgagcttaagggtcgtattttgggaggagagattccaactgtacctaagggtcacatctgcggaggaggagacgagttggaattaggaatcaagatgacaggctccaagtgaaccagggataaggcggtgggaggaggccaaagataggatggaggttgatatttatatatttggagaaaaacaggcacgtccgaccccgggctacccacctcgatagaggcaccagcaaccgacggggcaggccaagaatggagtagatgagataccccgggtgggaatgggtctgatatccacctgttctcccctcctccacgcaggcccccaggatggagcggccggagcccccacccggcacggctgcggggcaggaggagcaggagctgcgggagcgggccttcttctcgtgggccgagttcagccgcttcttcgacgcgtggtgccagcagcggctggcgctcttcttcgtcaagagctccatgcacctggcgcgctgccgctgggccagtgcgcccccgctctacacgctcatcgacgtgctcaagtacagctacgtgcggcttgtgtgcaaggacgtgcgtgcgcccagccggcccgccgtggggtgcgtgaacctgagccgctgtcctgctggggggaaggggagcaccgggggtgggtgtgggtgggagacgggcagagaacaccccacccagagatgcagagggggagaggccaactgaggcagccaaatacaccttgcagagaggcgggagtcaaggagggacatgtactgagagaagaagaggagctagagagacaaagatactcacggagcaagagatggtgtgggcccgacttacagacttttttttttttttcgagatggagtctcgctctgtcgcccaggcttgagtgcagtggtgccatctgcagcctccacctcctaggttcaagtgattctcccgcctcagcctcccgagtagctaggactacaggcacctgccatcatgcccggctaatttttgtgtggttttttgtttttgtttttgttttgttttgctttgtgttgtttttttgagacagagtcttgctctgtcactcaggctggagtgcaatggcacaatctcggctcactgcaacctccacctcccgagttcaagcgttgtttctcctgcctcaacctcctgagtagctgggattacaggcacgcgccaccacgcctggccaatttttggatttttgtagagatggggtttcaccatgttggccaggctggtctcaaactcatgacctcaggtgatctgcccgtcttgcctcccaaagtgctgggattacagccgcgagccactgtgcccggcctgacttacagaatgtaatagagacttcgagaggcagagcgtaaaacacacacaccccaagaggagaaaatagtcacggaaaattccagaaacatggagacatggaggcagagacaccagagacagccagggaaacagaagagccaggttttgtacacgtgacaaagactgggagacagagactgggagactgaactgcagagaagccgcaggataaagaaaaggatccatctattcagtgaataaggggccaggtcccatgctgtgggctggggatattctagttggagcgatggagttgggcaagagacaaaaatccctgcccttctggtactttctgactggacagaaagattgacgttaaaagaacaagctcacaggtagttccctacaactgtgcaaagaggggcaggtgagaaatccaggagagccagaatcacacccaggtggccaggggtattttaatggaccccaattgtattttatttagtctttatttttttgagacagggtcttactctgttgcccaggctggagagcagtagtgcgatcttggctccctgcaacctccaactcctgggttcaagagattcccccacctcagcctcccaagtagctgggactacaggtgtgtgccactatgcccacctaatttttgtatttgtagtagagatggggtgtcaccatgttggccaggctggtctcgaactcctgacctcaaggaggctgaggtgatctgcccacctcggcctcccagaatgctgggattacaggcatgagccaccacacccagccaaattgaccccaattttattttactttattttattttattttatttgagacggagtcttgctctgccatccacactggagtgcagtggcacaatctccactcactgcaacctcagcctcctgggctcaagcaattctcctgccttagcctccccagtagctgggattacaggcatgcgccaccatgcccagctaatttttgtatttttagggtttcaccatgttggccaggctggtcttgaactcccgacctcaggtgatctgcctgccttggcctcccaaagtgctgggattacaggtgtgagccacggtgcctggtctgaccccagttttaaacaggggttgttccccacacagttaggtttccagcttccactggaacaccggaagaggtgagcccatgtttccattggcagacggccacccctcttggatggggctttgctgcccaggtttgccccaaaccctgccactctctgctgcctcatccctagcactgtcttttgcttgttttgcctgcctggtcccagtaggtgtgtgagtttgagacccttggttggggagctgtagacaagaacagagtgcttaagaacacaggctctgcctttaggctgcctgagacatgctccacgacttcctggatgggtgactttgggcaatggacttcacatctccaagcctcagttttctcatcctttgaaatggggttatcacgatacccgcctcatggggccattgtgaggatactgtgagatcatacatgagaaaaacacataaccctggtgcctggaacatggggtggctggttaagtgatagctgttacaggattcgagagcatggactctgggccattgtgctgctgatgcttggtggatgctgttgagtgagtgacttcacctttctgtggcctcagtttcctcatgtggaaaatgggagacataatagtgtctatctcataggtaaattattcagaaaggcatccagcacagagtaagcacactcttaacagctctttcaccggtagttatttaaacatgtattgtgaaatacattcttgcaacttctttctcactacttattctagaaacagagactcggagatctgaaagtggaacagcatcaaacacacacatcacccagaaacctagaacgttagagcttgcaagaagctcaaagaagctcaggcctaatctgaaacctattaacagaacccagttccaatgtaacaaatgcttattgagcacctactatgtgcatgcccttcactggacgtttagaatccgagactgatctcggctcttgaacagttcagaacttaatggggtagacaaagaccaaaaaacaaaaaaaaattatagatagtggcccatagtagtgagagtgagattgagggggagatgagaggaggatacaaagggagtggtcagctccacctgaaagcttactgggtggttctggaaggcttcctggaagaggtaaccagtaagcagaaccttgaagaattttgttgatatgtttatgtatgtatagtatgtgagctaacagacacactaggtttactatgtgcaggtactgtcccaagtgctctacaaatatcagagacagccaaggagcaggagagacaggactatggagggggcgaggacagggccctgggtacactcctgggactgggtagatgatgagatggtctctgaatggggagtgcgggagcaggtggttgatgagccggttcaggaacgatatcttggagccgtcatgtctagctccctcactctctcgagctgctcaaagcagagcctctccagtgccacagcccagggacagcccatgggccgaggtcaggctggagaagttagtgtgtaaggaaaggcaggacatgaggctgcagtggtgtcaagggctggatctggcagggctgagtacaggagttgggactttatctgggggtggtgggagccctagaaggctgtgagtagggtcagttctgggtggaggaagatccctctggggccgtgtgggagacgatgtgggggagagagaagggatatgaaggaggaggctggggctgagggtgcaaggaaccagacaagaactttcttcctgtccactccttcccccttgccagaggttacacagtgactctcttgaagtcaccactgctgcagcttcagctctccagctccagttcctcccccatccctctctctcagcacttccctccctggaacagaattgctcagcctttctcaatacacaccggccgttgaaaacataaagatcttgaaaacctgaacgatcaagaataaatgggtagtcgggtgcggtggctctcgcctgtaatcccaacactttgggaggccgaggcgggcagatcacttgaagtcaggagtttgagaccagcctggccaacagggtgaaaccctgtctgtactaaaaatacaaaaattagccgggcctggtggcaggtgcctgtaatcccagctactcgggaagctgaggcaggagaatcacttgaacccaggaggcgaaggttgcagtgagctaagattgtgccactgcattccagcctgggcaacagagcgagactctatctcaaaaaaatgaataaatgggtaagtggaaggcaaatcaaagcaaagcaacgggtccttgaaaaaaagtttaaaaaaatagcaggtactatttctgcattgtttactatgcactagcccatttctaaccactttacataatttaatcctcttatttagccctctctacaagcctgagagactagtattactattggccccactttccaggtgagaaaactgaggcacagaatgcttaaagattgttcccaggataacacagcagctaagagggaaaaccagggtctggaccctcattctggttactaagcccatgattttaattaccaccctcccgcctttctttctcactttctctttctctctccttccctcatctttatttcaatcattcaaccctcagtgtgagggttgaccgtgccatggatcccctaaagatgtgttgtttctgggcaccagcctatccatcccttcacccaagaggtttttgggagcccctgcaatgtgcaaggtggtggttttagatgctgggatttctgtggggagcgtacattacagatggacataaataaaaatcccagccgggtgcggtggctcacacctgtaatcctagcactttgggaggccgaggtgggtggattgcctgagctcaggagtttgagaccagcctgggcaacatggtgaaactccgtctctactaaaataaaaattaaaaaaaaaaaattagctgggtgtggcggcgtgtacctgtaatctcagctattcaggaggctgaggcaggagaattgcttgatcctgggaggcggaggttgcagtgagccaagattgtgccactggggacagagtgagactccgtctccaaaaaaataaataaataaaaattaaaaaaaaataaaattccctacatgtgatggaccatgccctagccaggatatggtcagggaagacttcctggaggaggcgatgctggctgtgaggcctgaaagatgagtaggagttgactaggtgaaaagggagaggaatgttttatgaaggagggaagaacttacgataggttgtggcaatggaaaaaatgtggatgggtaggacgtggtgatggatggttttggtggaatggagaccatatcccagagtaggtgtgccagggtttgtaggttacatcgtgggatttagtcactgaatcatcacacacttactgaatacctccagacgccaggtactattctaggtgctgaggatacagagataaacaaaatagacaaaaattcctatccatgtggaatttacatttagcggggggatgacattattcctccagacaggtggagagaaattggaaaaatggcgtgttgaagcaccagtaggtggttatgtgagattctgggcccctgcagaggagatgccctattctctggcaagattcatggcttcacagaagaggtgacctacccggagcaaggggctgtcctagggcctgaaacacctaggctgaaggaagtcagacaagggtttcacaaaagcccacgaattattctagaaaaatgtacggggtggcataccgtgaacttgcaatcttgataaatcaaacatggctgcacgcggggatttcctttgcttccacctgataccacatggtggctgtatgtttattttattcatatttatttgtacattgaataattttctaaatgtgcattatttttgtattttttgagatggagcttcgctcttgtcgcccaggctggagtgcaatggtgtagtctcagctcactacaacctccatctcccaggttcaagcgattctcctggctcagcctcctgagtagctgggattacaggtgcccgccaccacgctcagctaatttttgtatttttagtagagatggggtttgcctatgttggccaggctggtctcgaactcctgacctcaagtgatccgcccgccttggcctcccaaagtgctgggattataggcgtgagccaccgtgcccggccttgttactttaaatgaggcataaagtctcaaactctgtatgttgattcttaaaatctagcaggctcctgcgtttttcttcacctcgtgcatgtaggaaaaaaggggtgtgtcaaggatgcccttctggtttaacaaagaaaatttttaagcatttatactggtggatttaagcatttctctgggtggatcctggggagaatcacccagttggggggccatttggaaaaagcataggagggcttttagggggtgtgttactggggtatttactacctgggagccagggtttcttaactacataccaggccccgggcagtctgtgttacaagggtcagcaaactagg[152 bp omitted]cctcctgagtagctgggactatgggcgtgtgccaccgcacctggctaatttttgtatttttagtagagacagggtttccccacgttggtcagactggtctcgaactcttgacctcgtgatctggccacctcagcctcccaaagtgctagaattacaggcgtcagccaccacgcccagcctgtagcctatttttataaatgaagttttattggaacatagccatgcctggtcatttacatacgtctatggcttcgtttgcaatatagcaacagaatatattaaacatttactacctggccctttgcagaaaatgtttgacagctcctgctgtataaacataaaatctgccaaaaaatgctgatattaccccacatggagaaacactgaacccctcttcagaaatcagatgccaatttaaatattactatcagagaaatacactctgatttttttttcctattccctttcttttattttcttttttgagacaaggtcttgctccgttgcccaggctggaatatgatggtgccatcatagctcactataacctcggattcctgggctcaagtgatcctcttgcctcagcctcccagaatagctaggactatgggtgtgtgccacaatgcctgactacttttttatgttttaattttttgtagagaagggctcttgctatgttgcccaggctggtcttgaactcctggactcaggtgaagtgatcctcctgcctcagcctcccaaagtgctgggatgacaggtgctagccactgcacccggccctatttcattttctacagtgttggttgcaactctctacattaatttcatgtaatgggctatgctgtgcagtctgagaaccgctgtcctagacaaactcttgctcacacacataaagagatgtataagagagtgttgtatcacacgttggggtgattgaagcatcattcgtaacagaggagaactggaaacaccatcatagatggcagagccgtggagtggaacattcggcagcagtaaaaggaatgaaactgaacagttttgaaaatccgagtgaaaagccagctgcaaaggcatctgtaaggtgggatgattgtcttagtctcaattgatgtaacaaactaccacaaatatggtggcttaaaacaataccaatttatttatctcacagttctggaggtcaggcggccaatatgggtctcagggctaaaatcaagacattggcagtgctgtgttctggaggctctaaggagaatctgcttccttatccttccagcttctagagaccacccatgctctttggcttggagcctcttcctccatttgttttatttatttattctagacggagttttgctcctgttgcccaggctggagtgcagtggtgcgatctcggctcaccgcaacgtccgcctcctgggttcaagcgattctcctgcctcagcctcccaagtagctgggattacaggcatgcaccaccacgcctggctaattttgtatttttagtagagaccgcgtttctccatgttggtcaggctggtcttgaattcccaacctcaggtgatccgcccacctcggcctcccagagttctgggattacaggcatgagccaccgcgccaggccattcttccaattttttttttttttttgagaggtaggggtctcactagtctcactatgttgcccaggctgaactcaaatgatcctcccagctcagcctcctgagtaactgggactataagcaagtgccactgtgcctggctcttcctccatctttaaagctagaaggtagcatctttcaatctctctctgactttgatcctcttacttccctctttcccttataagaacctttgtgatgacatttgggcctacctgggtaatccagactctccccatctcaagacccttaatttcatcacacccgcaaaggtcctcttgccatggaaggcagcatatgcacagtttcagtgactatgatgtgaatattttggggaaccatgattcttgctaccgcaatgctcggaaacaaagagttttctttttctttttttcttttttctttttttttttttttgctttgagacagggtctcgctctgtcaccccaggctggagtgcagtagtgcgatctcggctcactgcaatctctgcctcccgggttaaagccattctccttcctcagcctcccaagtagctggaattacaggtgtaatcccattagcctattattagccagcacgcctggctaatatatatatatatatatttttttagtagagacagggtttcaccatgt[137 bp omitted]acacacatccagaaaagtacacacatcatatgtgtgaaactgaatgaattttcccaaaaaaaaaatcagaggtaaccagcacccagaacaagaaacagaatatgtccagtcccaagaaacctcctggtgccccctcacagggttaaccacttaagggtaaccactatctagcctcctaacgatagaggttaactttgcctgctgttgaactttatataaatgggaattatatcagtttctctttcatgtctggcttctttcacttggtaggtttgtgagattcatccgtgttgttggaggttgtaatggtgtgttcattcttggtgctgattagtgttttattttaggaatataccacaacttattttctcactctattgttggatatttaggtttcaagtatttggcgaatacacatagtgctgctatgaacattctcgtacacagctttagatgcccatttgtcttgagtggcaccactgggtcacaggagagacataaaatttgctttagtagatactgccatgaagttttccaaagtgcttgtgccatttcacgttcccatcagtgatgggtgagagttccagttgctccacgtcctcatcaacacttgatgttatcagtctcttttgtttgaccattctgctgatgtgtagtggcatttccttagggttttaatttgttatgtctttgatgactaatgagtttgagtcctttttcacgtatacaatgcttttaacacacagaaacatacctcccattgtttatgggtgcataaaaatatacatggaatgctaatagataattttgatagtggctgcctctggggacagagggaaggaagataatctgttagggcagcgttcacagaaggcctcaacttttgatgttattgctaaaccagaagcagatacaggactatctgaaattttttatttctaaaaaaagttaaggtaaatacaataaaacattcactcacttttgacagaactaagggtggtaggtatagaattttagtgaacacttactgcttgccatattccagacactgtgtaggtgctttacctatattaactcttttcatgctcatgacgatcctatgaggaaggtatgatgagtaggaccttccttgtaacctatgaggaaactgaggcatagagacttgaagtgacttgccccaggtcacacagctggcatattcttagggccctctactcttctctatgcctgaaacaattcttagtttaaaaaaaaaaaaaaggtgagtggaaaggaagaagagggcagcagagtgatgtgaccagggcggtggtggttcctcccacaggcctccccagcccggctgccccgccttcatcatcgtcaagctgagcccgctgcgggaccgcctcgtggtgacggagtgccagctgacccactcacacccggcctgcccgctggagttcgcctactacttccgcccgggccacctgctggccaacgcctgcctgccggtgcgcaccaccaacaagatctccaagcagttcgtggccccagccgacgtgcgccgcctgctgtcctactgcaagggccgcgaccacggcgtcctggacgccctgcacgtgctcgagggcctcttccgcaccgaccccgaggccaaggtggggtctcgagagaggcaggccgggggagggggcgggggaaagccgcgctgaagactcgtgggtcattcatgccttcatccgccctctcatcccttcactcctttcctccattcatccgttcattcattcaataagtacttaccgaggcattggggatgcagcagcaaaccagacccacgtggtctctgtccgcagagagcttaccttctagggtagtgctgcccagtagaactttcttccaggatggaaacgttctgtgattctgcacccccagccacaagtggctactgagcacttgaaatgtgtccagtacactgaggaactgaattaattaattaattaattaatttttttgagacggagtctcactctgtcacccaggctggagtgctctatcacccaggctggagtgcagtggtgcgatctgggttcactgcaacctccgcctcccgggttcaagcgattctcctgtc[136 bp omitted]gcctcccaaagtgctaggattacaggcgagagccaccacgcccggcctgaatttattctaattaattgaaatttaaatagccacctatggctattggctgccttgcagaggtaactgccagaacgcccctgcagttctggcgggaaaaaccaacaactgacaaacatgtccaaatatgatgtaacatcactaggggctggctgggtgctagcaagaaggggagccacagtgatgacaaatgctatgtaagttttttttttttaatcttttttttttttgagacaggatctcactgtcacccaggctgagtgcagtggtgcagtcatggctcactgcaccctcgatgtcccaggctcaagcaatcctcccacctcattctcccgagcagctgggacaacaggcgtgcaccaccacacccagctaattttttagtttttgtagagatgtttggcgggggggggtctccctatgttgcccaggctagtcttgaactcccagactgaagcagtcctgcttcggcctcccaaagtgctgggattacaggcatgagccaccacgccaggcctacttaaatttttttttttttaattgaactgcacaaacagaaaatgcacaaatgataaatacttagtttgatgaatgttctcaaggggagaacacacctgaacccaccatgcagatggagaattaggagaaggaagagtgctatgtcctgtaatgtgatggagcgataagttatcatcaaggagaaaaaggccggggcctggagcgggacagttctaagggtgctgtttgaattggtcagggaaggtctctttagcaaatgatggtgaagcagaggagatggaacagaggcaagggaccctcattctgtcatcagagggaagagaattctaggcagaaggaacagccagtgcaaaggcccagaggcacgagcaagcttgtgttggaggaacagtgaggatggctgctgctccataaggaatctctgcggctttaatccaacttcaagtttggggtgaacttgaagtttaaagaggaaagaaagatgagaaagtaggggaagaactggtttctcctcctggctgtgcctttgtctcccttgtgtgtggaagaggtcccaaggcagggtaaagtcgagattcagctctggcacactcttcctgtcttcatctcatgcccagtaagaagccctgattcaagccaccagcccaagcccaggcctctgtcccgacataataataattttagctaatgtttatcaagcacttactatatgccaggcactaccctaagtgctttacatactataactcattttcatctcacctgagccctatgaggaaatagtccaccattctcatccccattttacagacaaggaaactgaagcacagagaagtcaagtaactggctcaaagtcacacagctatttagtgacagagctgggcttcggacccacacagcctggatccagacccatgaccttcaccatggggacaaacacacatgcacttcctactccactggtctttgctgatctagtaactctcctccactacccaccatgacataaataagcctcagctgttcttccctgaacccaccctctgcaggattgtccctgtgcagaacagctcattcatagatcagagccttccctggaaggggagttgtcttttcattttgaaggctgtcttggaatctcggctaaaccacggttggctcctgcgtctgtgttttgacctgctttcatactttttttttttttttttttgagacggagtttcgctcttgtcacccaggctggagtgcaatggcggaatcttggctcaccgcaacctccgcctcccgggttcaaacgattctcctgcctcagcctcctgagtagctgggattacaggcatgcgccaccatgctaatttttgtgtttttagaagagacggggtttctccatgttggtcaggctggtcttgaactcctgacctcaggtgatccccccgccttggcctcccaaagtgctgggattacaggcatgagccaccgtgcccagccccttaatgctcttgaaagaaaggaggaagaagttctaggacaggagagacagattagtgaagcaacatttaaatatttactttttgaatatgtcatacattcacatggttctaaaaaaggtatgtggtgaaaagtcttatcacatcctgtcccccaggtcccctcccctgcagagttattagcagcttataaatcatatctcgctttctatcctatggaccagcactgcccggtggaactttctacaatgatagaaatgttccttatccaggctaggcatggttactcacacctgtaatcccagcactttgggactctgaggcagatggatcacctgatggcaggagttcgagaccagcatggccaacatggcaaaacctgatctctactaaaaattcaaaattagccaggcatggtggcaggtgcctgtaatctcagctactcgggaggctgaggcacaagaatcgcttgaacccaggaggcagaggttgcagtgagctgagattatgccactgtactctggcctaggtaacagagtgacactcttgtctaaaaaaataaaaagaaagaaaatggttcttatctgtactgtccaatccagaggccactggccacacatggctacagaatgcttaatgaggccagtatgactgaggaactgaatttgtcatttaatttatcgaaatgtaaacaacctaatgtagctagtggcttctggattggacagcgcagctctgcacatatacaggtcaatttgcatgtctgtatgtttaactttaatttttaactttatttcctctttctgccccgccaccccccacccccagcaagcagggcagcctagtgtacacgctgtttttgtttgtttgtttgtttgttctttgagacagggtttcactcctgtcacccaggctggagtgcagtggcacgctgttggctcactataacctccacctcctgggctcaagtgattctcctgcctcagcctcctgagtaactgggactataggcatgcaccaccatgcctggctaatttttgtatttttagtagagacgaggtttcaccatgttggccaagctggtctcaaactcctgacctcaagtgatccactcaccttggcctcctgaagtgctgggattacaggtcggggccaccacacccggcctgtacatgctgttttgcatcttgctttatacgttggggagtgccagatgtcaccatctttcgttcttcctctggggctggtcaaatccccctgagaaaactcctctggcctcctggcggggggtgaaggccaggctgccagggccaggctgccagcttctgggagctgcaggggcagaggcagggagctgtcaggcattcagccagcaagacgcactcagtacccacttggggttcagaatccccctccctcatcttcagatgggccagatgtccccaaagccagcggcccctttctgtttcaccctgtctacagaataaacccccagtcactgggggtgggggaagagtaaggggagaggggaaacgagatttggaggtctagctgctgctgaaacagccctcagttcgtctttattttgccttctgcaaaactggcctggtgttgccagctccttttgaggactttgctaccggttctcagcatccctcaattgctggcttaggattcatgggtttttaggggtggggtgggattagcatgtccagctgctttccagtttccaaagttctgtccctatcatattgcctctgatttaaaaaaaaaaaaaagccattttaaaaaaaagatgtaattgaggttcaagagagagtgaaactagagaggtgttcaatccatcacttttacacagaaatttcacctttttttcacttataaaatctaatgaaagagttctatattattatgttaataatacagtagtaatataacagtataatgtaataattaatatattatattaattatatattataattatatattatattatattatatatattatatattatatattaattatatatattatatatattatatattatattataatatattatattatattatatatattatatattatattattattatattatattatatatattatatataatattatatatattatatattatataatataatattatatattatattaatattataatatgtaacgcataacatgtaatattgataatataataggtgcgatggctcacacctgtaatctcagcactttgggaggccgaagcgagaggatcacttgagcccaggagttcaagaccagcctggccaacataacgagcacctgtctctacaaaaaattaaaaaaaaaaaaattaggcatggtggcatgcatctgtagtcccagctactcaagaggctgaggcacgagggttgcttgagcccaggagcttcaggctgcagtaagctatgatcacaccactgtactccagccttgacaacagagtgagaccctttaaatagatagatagatagatagatagatagatagatagatagatagatagacagacagacagcaagctttaaattttcatcccaagcctaggtcaagcaacaatcagtctttccacttcccagcagtcttccaaaggaaggattatttgtaaaaagtgcctgcacttcctgagttgggttgctctcttgatctttggaggggatcagacaagaaggatgcgcccaaagccacaaggcatgatttaagggcaagactggggggcgacttcacccagggaggtgttaatacctttttttttttttgagatggagtctcgctctgtctcccaggctggagtgcagtggcgcaatcttggctcagcacgacctccatctcccaggttcaggtgattcttgtgcctcagcctcttgagtagctgggactacaggcgtgcgccaccaggcctggctaattttgtgtgtgtgtgttttagtagagatggggtt[148 bp omitted]ggggtccagtcacatctccattccctcacttgtggcaggcaccagggtaaccagcaagcaagccctgaaaagagagaccttgcccggaaacgttgcagcgttctcttacgtgtatgctttgccttctgagaatggcgagcattgatgcaagtgtatcccttttaagaatactcaat[184 bp omitted]gaggcaggagaatggcgtgaacccggaaggcggagcttgcagtgagctgagctcacaccactgtactccagcctgggtgacagagcgagactccatctcaaaaaaaaagaatactccatgggaagctggtatgatctcagtggagggcaatttagcaatatctatcaaaatgacaagaacactcacccttaggctcacaatcccactactggtgatttatcctgcagatgtagttgcacagctgtggaaggacttacttacaaggttaatcattgttgtttgtgaaagcagcagattagaaacaacccagactccaccaacgggtaatggttacataacttgtggtatatccatccatggattactacacagcactaaaaaagaatgagaactttgggaagccgaggcgggcagatcacaaggtcaggagatcaagaccatcctggctcacatggtgaaaccctgtcactactaaaaatacaaaaaattagccaggcatggtggcaggcacctgtagtcccagctactcgggaggctgaggcaggagaatggtgtgaactcaggaggcgtagcttgcagcgagccaagatcgtgctactgcactccagcctgggcgacagagtgagactccatcctaaacaaacaaaaaaaaaagaataagaacaagtctaggaactattttgaaagatctctcaaacacatttttaagttaaaaaagcaaaatgcaaaactgtacataatatgctgtattatctataaaatagagcaaataagaattataggtatgcttacttgtactcatataaagaaactctagaagaataccaagaactgtggatgagggtagaatagtgaatggaaactgactgattagactaaagaggtgggagtaagaccttttatgtatcgctttacattatttgactttaggaccatgtggatgtttgcatattcaaataattaattcttaaaaagaagatgaaaatagaaggtgggcgcagtggctcacacctgtaatcccagcacttcgagaggctgaggtgggtggatcacttgaggtcaagagtttgagaccagcttggccaacatggtgaaaccccgtctctactaaaaatacataaattagccaggcatgctcgtgggtgcctgtagtcccagctactcgggagactgaggcagaagaatcacttaaacctggggtggcggaggtcgcagtgagccgagatcatgccactgtactccagcctgggtgacagattgagactccatctcaaaaaaaaaaaaaagaaagaaaattaagcaatagtcccaacatactaaacgcatttgtttctctcctcaaaggaaaaattagagggcgagttatagagggtcttgaggttgtgtgagtcaggatggcctaggttttgctgtaataatgaacagccctcaaatctcagtggctgaactcattgaattttatttcttgctcacttacacagccaccacgggatgttgggggagtactgtttatctgagtcattctgggacccaggaggatgggcattcagcccaacgtaattaccatatctggcagcggtggctgcgaaggcttctccttggatgcgatgccgcagctccctcccactcacacttgattggccaaagcaagtcacatgacactgcttacctgcaagggggcagggaggtgcaacgctactaagtgcccgggagagggagaactgcaatttcttggcaagcggcaaaagataaccacagggtactgtttcatcaagggccgcccaaagccctgtctgaatatggggctcgtgtttcccctgctatgtagttacacaggcctcctgcagcttagtttcagcttttctagtttttcatggctcccagagggaatattttctatgccgtatagcctgttttcacatgaagccattttggggtgttatagtaacagctggtgacttgattttatttatgttgctatgtgctgaaagctttatgaatgttctggctgtgccagttactagctgtgggacatggaacaagttatgaacaacctatttaccttctccaacccttagttcatttatctgtaaaatggggataatactatcttatagggctgttggggttgttgtgtgagaaagtgcagtgtgtatgtgtatgtgtgtgtgtgtgtgtgtgtgtgtgtgtgtgtgcagaatgggtagaaccgtgcccagaagtaggaagccctgcatatgttcaatatttagctattattttgttgttgttgtttgtttgtttgtttttttgagatggagtctctctctgtcgcccaggctggagtacagtggcacaatctcggctcactgcagcctccgcctcccgggttcaagcaattctcctgtctcagcctcccaagtagctgagattacaggcgcgcaccaccacgcccagctaatttttgtatttttaatagaggtggggtttcaccatgttggtcaggctggtcttgaactcctgacctcaggtgatccacctgcctcggcttcccaaagtgctgggattacaggcgtaagccactgtgcccagccttagctattatttttattccttcaattttttctttggggcagtctggagaacagtttcatgtgaacattctgatcacatggaaaagggaaggtttactcacgtgtcggaagaggtgtgaatggaaagtagtaaaggcatggtttctgatgttcatgtttgtggaatctgtcgtctatggcagatgcttccccgtgctaccaatttgtgtgtctgaaaggacacccgtacattcatctgcatcctcaaaatctgttcctccgtgggtttctccatctctgcaaaatgcactgctgtccactgtgtgcctaagccagccctgtttggtcaattttttgaaggctgtagggtagagtggtcaggaacaagaagccctggacccaagctgtcagggttcaaatcccagctcacctggtattgcaaatcgcatgggtgactccaggcaagcaactgaagccgtgtgtgcctcggtgtcctcatctgaaaaaggggaatgagaatcatagtatctatcttacagggatattgtaaggatgaaagattagctgttggaactgtgcctggtgcagagaaactacttcatgtgtgctttgcacacccgaaaccttcttttttatatttatttatccttggcctgggggctgtctcctctcactcagtggtgtgtctcatttgttctcctctgtgcctgagccagcacatggcacatcatattttctcagtaaatatctggcagaaaaatgtattcatcagcctggccaacatggtgaaaccccatctctactaataatacaaaaattagccaggcgtggtggcgggcacctgtaatcccaactacttgggaggctgaggaggaagaatcgcttgaacccgggaggcagagg[138 bp omitted]atagccccgccttcatcaaatgtcaccctgccccttaaaatgccgcccatgcatgttctcccacctactgcttttgtttccaatcattcctaatggcccggatctattggatcccagcatcactgcttgttagcgcagtggccttgggcaagtcactcctctggtgcagatgggggtccctaagaccaccctcagtttccatgattcactagaaggaatcacagaactgagaaaaattgttatagtcaaggctacagtttattacagcaaaaggatacagagtaaaatcagcaaaggcaagagccacacaaggcgaccccatcagtctctctgattccttaattatctaacagcagcacatagggcagaggccaagagagaccagcatgagctgccagatgtcgtctctcagtgaagtcccatggacagtgctcagttctcccagcaatgacatgtgacaacaatgatgtattgctagccagggacacttacttgggccttggtgtccagggttgttattggggtcagccatgtagacttgtgctgaatactgctgagagatcgagacagacggtaagaacggctgagagctgatgcacgccaggtgtccttccatgcgttggccaggagtgatctcattttagcccatccatgaccctgttaaatagacatctccatttttccagacaaggaaccaaggctcattgaggagaggtcacttgcctgaagtcccacggctaataggcaaatccaggagtctgatccttaaacctccacccttacagatgtggccttggacatggctgcacaccctcgcgtgagttcactcactcaggatgtattgagccattgttccagggcaggtagcattcaaagcatcaggggtgctgttatagccaaggctacagtttattacagcagaaggacacggaataaaatcagcaaagggaagagccacatagggcagaggccaggagagaccatcccgaaggggaacatccctgtgcttgtggggcttccatcttaaggagggcaagcaggcaatgggcagatcaggaaacgaagatatgacttgccaaagggtggtaagtgccatggccaaaaggaggcagagagagatggggtgtctgcttagttgggaagtcacagaagagcgggacgtgatgtttgaacagagacgataattataatggccactttcagaacacttactatttgttggataagtaataacagtaatatatgtaccaggcaatgttctaaatgcttgaatgcatctcatctttccaatcacagagatgctcttattatcatcactttacaaatgaaagggaggttagggaagttggcagaaggcacacagccaggaagcaggggctccaggatctcagcccagggatcttggcctcagaggctatgcttttcaccactgtcctgcctctcagtgcatggagaaatgaatgttcagtgcctagaagggataatcagggaatatggaggttaaggaggcaactgaggcacagagaggttaaatcgcagggttcagaagtgttgggggtgggactcaaagctaaatgatctgcctccacaatctaagctcattaccaccagaccagtcatccttaagcatgcataggagtcccctggagggcttgtcaaactagattgctggggcccgcccccagagtttcagactcagtgggtctgaggtggccccgagaaggtgcatttctgtccaggtcccaagaaccgatggtgatgctgctggtccagggcccacattttgagacccactgccctagactgcctctcagcacacggaggaatgaatagccagcttccggcggaggaaactgaggctcagagaagctaaaagtgtcatgtggaaaaaatcacatagccgttagactgtggtacctggatctcaaacccaggcaatccggctccagagtgtttttaaccatttccctgcactgcctcctgccggtcaaaagaataaatgcatatgcaggcaagaatgaatgggtggtcccatttccgtagaaggggaaaccgaggtcggggagctgggcggggagaccccagcatcctctgacctctttccttgcctccctgcccccgcccgcaggtgaagctggtgttcgtggaggaccaggctgtggtggagacggtgttcttcctgacgtcgcgcaccagggcgctgctgcggcgcttccctcgcatgctgctggtggaccggctgccggggctgcagggcgcgctggatctgctggccgtgctgtgcgtggacggctcgggccgtgcgcgccaggctgcctgctgcgtggcgcgcccgggcacaccgagcctgctgcgcttcgcgctcgcgtcgctgctgcagagcgcgccagacgtcaagggccgcgtgcgctgcctcaccgccgggcccgaggtggcggcgcagttgcctgcagtgcgccagctgctgccctgcgcgcgcgtgcagatctgccgcgcgcagggcctggagacgctcttcagcaaggcgcaggagctgggcggcgccggccgcgaggacccgggcctgtggtcgcgcctgtgccgcctggctggcgcgtcgtcgcccgcagcctacgacgaggcgctggccgagctccacgcccacggcccagccgccttcgtggactacttcgagcgcaactgggagccccgccgcgacatgtgggtccgcttccgcgccttcgaggcggccagagacctggacgcgtgtgccctggtgcgaggccaccgccggcgactgctgcgtcgtctcagcccctcgcgtggcgtggcgcagtgccttcgcgacctggtggccatgcagtgggccgacgcggccggggaggcggtgcccgaggggcccgatggcggggggccttggctggaggatgagccagggaggggagcccagggggagaacgagagggtgaggggcctggagacaggcgactggggaggggctccgaaagaaggaagtatttggaggggagcccagatggagaaggagtgggcaagggcactggaaaccagagactggggcggggctcagttcgaaggtgagaaggggagggcactgcagatcagagattggagagggggtcggttggagaatcagaagccgaggggactggaagggggtgtcttgagagggtcgaagttagagaaagggcacctgagagggccagagattagagactggagggggccccagttggagggtgagaaagattggggactggaaggttatgtctggagggggtcccagttggaggaccaggcgctaagaggattggaagggtatacctggagggtggcccagctggaagatcgcaggagtaccaccgacctgagggggacccagtttgactatgagagggtcaggagtcttgaaggaagcccctggaggggggcgcagctgcacgatgaaagggcagggggactgagaactgcagaatggaaggggccacagtcagaagtagagaaggggagggggctggaggtcagaaacttgagggggatccccttggagaagtccctggagttggcccctgagaacggagaccaaaggggaccccagtgggaagatgagaggaggagagggccagagattgcagaggagaggggagcgagggtgggggtcaaaagaagaaggggcctggaggatatagttctggtccagctgggagacacgagggtcacaggcatggagaatggagatggagggggagcccggtccgtgggccccaagagccgagccggacgagggatggagtggggagacgcaggagggcggtgtctagggctggggaatggagtcgtgtctggcaccccggtggggactgtattggaaggcagcccagaatgggcagcggcgaggagtgaacacctggctgcaggtgacggcctgcaggaaggaggcgaagatggccccagggaaccaaagaggctttgccgacccccgggagaggaggaggtggactgggaacccctggccaaattccgagcagcctgcgggccagagctggcagacctggtggctgaggagttggcctttgctaggcagcatgggacccggggtttccactggaccggagctggctttgcccttaaggacggcacctcggacttcttcctggatggggccctgacacgctgcagctgctcaattcacgccgcccgccgtctgccctgcagacacctctttgcagcgcgcctcctcactggggctgccttattccacatggacctgctcagggattgctgggggagagccccagagccctgacccttcatgcctctgcccaccaccctccaccaggagggtcggagggcattcttcgatcccaaagataatagggctgaggccaaggagaccgttgcagtccccctggccaccttctgggtcatccagggacctcctcatggcagtttgcctctctgggtccaagggcaagctgtaagtggtctctgaggtcctggagccacagcttgggaaggtgttgatgggcagggtggattctgagggcttccctctggagaggaagcatgtgatgagaggtgtagacagggtcaggctgggacagaaggaaggaaaggggcagagctggggggagggggaggaagcgatcatatggggagtgtctggcaagagtagactggccagtctagggagtgcagcggggagaggggaaagggagaaagtacagaagacagatgaaggagaggaggtaagcgagaaaaaatggaaaggggagccggaaatggaggagagaggacaagcaaagagacagaaatgaagacatgaggaaaagctgggggaagcaggagaggaagggacgggatgtaggagggggaagaaaaatcggagatgagacaaaagaaatgtgtgggagacgggtagagacgaaatgcaaggggcgtggttttggtttttctccaagacctggagacatcgacccccatcgccttctgaagagagagggagggcgggcactgggggtcaggagagtctccagcaggggaggggaattgtttggactattgttcttcaggattggaataaaacaatcttattttggtttccgtgatgagttcttggcttctggggttggttgggagtcccagatccagggaacagttgagatggtccagcgttccttcattctttctaccgacaaggcctcctggggccagatggatagaggagccacaatgaattcatctccatagcaactcaagcttcctcctccatcatctggaccagtgcgtcccagtggcaacttcttgacatgagtcgattctaccttcaaatgactgactcatgccaaatgtcctggccacagaatgggcctgtgacccagtcctggtcaacgagtctgctcaggttgaggtgggaggcttttttatttttatatttttgtagaaacagggtcttgctatgttactcaggctggtcttggactcctcggcttaagcaatcctcctgccacagcctcccaaagtgctgggattacaggtgtgagccactgtgctcagaactaggaagcttttttttttttttttttgagtcttgctctgttacccaggctggaatgcaatggcacgttcccggctcactgcaacctccacctcccaggttcaagtgattttcatacctc[134 bp omitted]cagcctcctaaagtgctgggatcacaagcgtaagccactgcgcccggcctaggaggcttctaataaagattctatcactcctaagaaggcctagagacatgatcaggcctagacctgctgatgattaccttggtatggtgtgataatgaagtccacactgaggatgacagagctgagatgaagaaaatctggatctttgcttggctcagttgagtctctcgagtctgctctaccatggggcttcttaagtaaaatatatccttttttgttagagacagtgtctcgctctggcccaggctggagtgcagtggtgcaaacatagctcactgcagccttccagctcttgggcccaagggatcctccagctcagcctcctgagtagctaggactataggctcgtgctaccacctagctaatttctttttcttttcttttcttttcttttttttaactttttgtaaagatgaggtctcttgctacgttacttgggctgttctcaaactcctggcctcaagcgatgcccctgcttcagcctcccaaagtgctagaattacagatgtgggccattgcacctggccaatcaaagataccctaatgatttagggaagtttgagttggggtttctgttgtcgcaactgatgaaggggatttaattctattataggtgacaaagtccaggttgaagtagctcagcatttttcaaactttagcgtggacgtgagtcacgtgggcaccttcttaaaatacagagtctgactcagtaggtctaagatagggcccaacattctagcaagctctccgatgatgtggctgtgctgggttgtggagcacactttgagtagcaatgaaggaacttgagataaaagacaattcaggccgggtgtggtggctcacacctgtaattccagcactttgggaggctgaggtaggtggatcacttaaggccaggagttcaagaccagcctggccagcaaggcaaaatcctgtctctactaaaaatacaaaaattagccagatgtggtggcgggtgcctgtagtcccagctacttgggaggctgaagcatgagaattgcttgaacccaagaggcgcaggttgcagtgagccaagatcgtgccactgcactccagcctgggtgacagagcgagactctgtcaaaaaaaaaaaaaaagaaaaaaaatgattcagtggttcaagtcatgcgaagtcaaaggctttgatggcagctgactgcaggggctcaaacaatgtcaggtttcccctctctcgcctgcttttcgtgcgatggatttcttcaaaagacagctctctcctgagaaagggggggactagaagttcccatatcacaccctcctatcttgatccaaaaataccattctatcagcattcgtatattaagtctcaaggaagcagcaggttggatttatggaggttatcagttatccatggctacataaatgctgtgttaacaactataaaacttcctaagtatataacaataaacatgtatttggaatcaacctaaatgcccatcaataatcataagctagataaagaaaatatggtacatatacaccatggaatactatagagccattaaacaactagatcatgttctttgcagggacatggatggagctggaggtcattatccttaatgaactaacacaggaacagaaaaccaaatactgcatgctctcacttataagtgggagctaaatgatgagaagaaatgacacagagagaggggcaacacacatggagacctactagggggtggaggatgggaggagggagaggatcgggaaaaataactaatgggtactaggcttaatacctgggtgacaaaataatctgtacaacaaacccccatgataaaagtttacctatacaacaaacctgcacatgtacccctgactttaaaagttaaaacaataataaaaatgaacacgtattgcttatgagtcttgggtcacctgaggggttggctagacccttgcttttcagtgtggtgcatgcaacagtgtcatgaacattccctaggagcttgttagaaatgcagattctcggctgggcacggtggctcacacctgtaatcccagcactttgggaggctgaggtgggcggatcacctgaggtcaggagatcgagaccatgctggccaacatggtgaaaccctgcctctactaaaaatacaaaaattagctgggcgtggtggcgcacctgtagtcccagctactcgggaggctgaggcaggagaatctcttgaacccaggaggcggaggttgcagtgagccgagatcgctccactgcactccagcctgtgcgacaaagtaaaactccatctcaagaaaaagaaagaaagaaaaaagaaagaaatgcagattctcaaacccattccaaaactacagaatcagaatctcattctaacaagatcctagtatgcatgttatactttgaaaagcaaagcaactgatcataaacctacaattatcggaaataggcttatttaaaaaaaatgaaagcagctaatcttgataaagtagctgatcttcgttgggcttgcccacatatcgggagtcatctggcttttgggtgaactaaaaaggccttggcagggcttggtggctcatgtctgaaatcccagcactttggggggccaaagtgggaggaccgcttgagcccaggagttcaagacgaacctgggcaacataggaagaccccgtttctacaaaaatagaaacaaaattagcctggtatgatggtgcacgtctgtgatctcagctactcaagaggctaaggtgggaggatctcctgagcctgggaggtcgaagctgcagtgagccatgattgttccactgcactccagcctgggtgacagagtgagactctgtctcaaaaaatgccttggccgggaggactagggtaactcgttcagcacgtagacccctccagtacaaccctatgaaacttccctgcagcccctgcctttgcagacagctcttcgtctgctgtgctgcccattgctttcttgcaatgtactatctgtctaataaatctgcctttctttccctacgactgtcttgataaatgcctttacctcccatgatactggccccagctagtcacacccgtgatgcccatctcttttttttttttgagatggagtctcgctctgtcgcccaggctggaatgcagcagcacgatctcggctctctgcaagctctgcctcccgggttcacgccattctcctgcctcagcctcccgagtagctgggactacaggtggccggcacc[184 bp omitted]aaagagagaaaggaaaggaggcaggagggatcctgggaaggcaaacaacagctattgagcgcaaaccaaatccaaaacttctccacttgcctgttttatcattagattcttagatgtgggctatctggttagtgacgggaagctgaattaattcattaattgattcaccaaataacacacagaaccctggggtggaaaagagctcagcccataaggtaaagagaagatgggccagtgtagatgggtcagagtgtgaaagagggagagatttggacagtgaaatccgcaagcccttaaagatagaagatgaggtgagtctttatcctgggaggtatgggaagccttcaaaaggttttaaacagagagtggcttgattggatgtacattagaataaccacctcccctaccccagaagctttactgtgacaaatggattggatgagtccagaccaggaagagacgtatgtgaccataaacaaacaaataaaaataaattttaaaaaacaggcagaaggatcttcacagaactggaccttgaagaatgtgtttgccaggaaaagagaatgaagaagtacgttcctattggagggaactgcacgtattacagtatttggcccttcaggaaggcaagaggaaactaaaggttagtaaaccttaaccctctatatgccccacatatatagctcacagtgttaaatcaagtttagcctaaagctgcctccttacatattttaagttcggcctgaaggtttttctgtacgtcgtgaactataacaagtggaggtgtaaacagaaggtggcctacgcttgtgccaatcaccgagttttgggcaatcaaatgtagccaactgttcgaactgtgtacagcaaacgccgagctgtaatcaatccagctgtttctgtacctcacttacgttttctgtatgtcactttcctttttctgtccataaatcttccaccacatggctgtgctggagtttcagcctactctggcccgaggctacctgattcgtggatccttcattgctcaattaaactctatttatttatttatttagagatggagtctcgctctgttgcacaggctggagcacagtggtgcgatctcagctcactacaacctccaccttctgcgttcaagcaattcttgtgcctcagcctcccgagtagctgggactacaggtgcccaccaccatgcctagctaatttttgtatttgtagtagagacagggttttg[132 bp omitted]aagtttttcttttatcacaagtcacatcaatccctcgggcccctgctcaaatgccacctcttcctgaaagccatccctaagtagtctctctaaagagccatccctgcccctttctttgctttatccttcacagcacttatcactacctgaaattatgccacacagctatttaccactttggcattgtgattaagcttatcaagtatgaagccagactgcctgggttcaaatcccagctccactacttccttgtcatgtgaccttccagcctatgttacagttgaggggtcataatagtacctgtctatagggctttgtgaggatgaatgaattagtgtgtgtaccagtgttctaacatcgcctgcatttccatttttcccaaagcagcccagttacttattaacatactgctttttccagtgacacgtgttcacagttattaagtcgatctcccgccaaaatagaagctctattttgttttccattgtatccccagtgcctagaacagtgcctgttgcaaagtaagctttgagttaaaaaaaaagatgaaagaatgaaaatggcagactgcctagcagaactagcccttcccgatgtttcattgttgctatagtgacgatccagtctgcacgaagatcccagcttccttaaccttgttcctacctccagccagctcacccattggccacctgtatctcctgctgtagcagccagaaagctacaactcccagccggctgagcgccaccagcgctttcgcgtccaagtccctttgctgagtgtgagggcctgcgcagtagaacccgcgggcccagagctccatctgagcatgtgcaggctgcggggtgtttccttcgtctgctggcgggagaggagtggggaggagctctttacccgctgagcattgtggggcccgcttggatctccttgtccaaagggtctgggcgccggggctgcagtctctgggtgaggaggcggacgcgggaaacctgcttcggtctccatggttacgagccgctcagcgcgcaggagggggattcaaaggttggcgttgccacagtaaccctggagtggaaggagacggggattagagacctcgcgggagaaattagactaacagcctgggaactggagggatggagggtgtgccggaggaatcagtctgcagtaaggggagttggggtgatattaggggaaatgggatgttttcaaggacagggagtgttttggtgaattcctatgtaataaggagatttggggagatcattgaaatcgacaagttactagatacttgggatgctcaaggggaagtggaaacgcagtaggatccgcccgcctcagcctcccaaagcagtagggaaaattggggtattaagctcttttgccattctgcagttattatagagctcctgctggaagccaggcacagttgacagtactggtaaacaggacagatgtgactatagacggaattggggtttcatggagaaggggaggtataagaaaaggggactgttgtcctctatgggagggactgggaggcgattgggaagaactggcgctgtaaagagaagctggaagttttataagggaattgaggtattatataagttaattctgttgttatttatagaaggccaactcagtagcagcctctaggaagcactgaggattcctcagtatgcaaaggcatttagtgatagagttaccagatttagggggaaagcaatggccagttaaattctaatttcggaaaatgcataatattgtagttactctctgttgtttatctgaaattcaaatttagctgggcatcctgtattttatttggcagctctcattatggttaatttaagtgtttgtgaagagtgggttattataggggaaacaggtattatagagtaattgggttgtaggaggagctggggatagtcaggaaaagtcggagtgttgaagctaacgccaagatcagcactgactgtgtgccagagactatgctaagtactcttatttttaaaaacgttttattatggaaagtttcggccatatacaattgtttgcttgtttttgagatggagtcttacgctgtcgcccaggctggagtgcagtggcatgatctctgctcatttcaacctctgcttcccgggttcaagcgattctcctgcctcagcctcccgagtagctgggattacaggtgcgcaccaccacgcccggctaatttttgtaattttagtagagaaggggtttcaccatgttggccaggctggtcttgaactcctgacctcaagagattcacccacctcagtctcccaaagtgctgggattataggcgtgagccactgcgcctggcccatatacaattgttaaacagataatatataataaagctacttgtacccatctctgctttacatgagtgctgttgaggcatcccaacattcctatgaggtagcgttactgtcacacccccattttacagatgaggaaactgcaccacagagaggttaaataacttggccagaggtgttagaaccagaatttggacccacacaatcgggccccagagtctgggctctcagctgccatatcacatgtaacctccgtctgggaaatgtgagtagggagtgaggcatgatgggagcaacaagagagtagtagtaaggtataaaaggaaaggtagggaattgggccgtttgagcattgtgcagttgttataggatttttatttttattttttgagacagagtctcactctgtcacccaggctggagtgcagtggtgcaattttggctcactgcaacctccaccttctgagttcaagcaattctcctgcctcagcctcccaagtagctgggattacgggtgtgcgccaccatgcctggctaatttttgtattttcagtagagacgaggtttcaccacgttggccaggctggtctcgaactcctaacctcaagtgatccacccgcctcagcctcccagagtgctgggattacagccgtgagccatcgcccccagccagttgttctaggatttttataagatgttttgggagactgggggagttacagaagagtttggtgttttgaaacattatgggaagttgtatagttgcatttcaatagaacagtagcagctagccacatgtgggtgcattacattaattataatgaaataaaactcagcacatttcaggaagcgcctaccgtattggatagtgaagatctagagcagtcccaatgagtctggataacagggatttagggtaaccaagggttaaggcacaagcaggtgcagccagttctaggcaagattgggcagcatccaggccacatcctcactcctgtgataacaagacagaagtctccacttcagcctcttgattggtcacgggccaatccttcatagggtgtaaccaactggaggcctctaaagggcacctaggggtgttaccaaattcttttagcttaatgaaaactctaaagagcactgcagtcaggggctcttgagctacttgctcaagcccactccgactctggagtgtactttcacttccataaatctgtgctttcgttactccgctcttttgttgctttgtttgtgcattttgttcaattctttgttccacacaccaagaaccctaacaactcacagtcaggaccttccatagggtaacaccatcactgcagaaagttctgttggacagccctgatgtgtggggtgacaagtgtggaggctttcctggctcctaaagttcgaccttatctcttagcgattgctctcgtacttcctctgactcacccctaaccttctcctctctgttctactaaaaatacaaaaattagctgggcgtggtggtgggcacctgtaatcccagctactcaggaggctgaggcaggagaatcacttgaacccgggaggcggaggttgcagtgggccgagatcacgccactgcactccaacctgggcgacagagagactctgtctcaaaaaaaaaaaaagaaaagaaaagaaaaaaaaaaccatgctgaattggccaaatatttatctaggacttcccagcctgagaactgtaagaaataaaattttactctttaagccactgagtccatggtattttgttatggcaacctgagcaggataaggtagtatacatacctttaacttcactgtgtaacttcagattaatttccaaaatcaagcattacctaaccaacagcagaacttacatttgtgctccatatactcaccagtagtaggcattactgacttcttaataaatggaagtttgatgaatataaaatgtagtatttttatggcttttaatgaggtttctgataactagacgtatgaaattctacttttgttcattgtccattgcgatttacaaactgtaacattttactcataacgtttgcccatttttcacaaggagttttctgtttgtttactcatgttgaatcatttttatgtattataaatatcacctgatatttacatcttcttcttagtagcttcattctaatgaacttcttcttttttattgttgtttttctgtttttttttttttttttttgagacagaatgagactctgtcagccaggctggagtgcagtggtgtgatcttggctcactgcaacccctgcctcccaggctcaagtgattctcatgccttagcctcccgagcagctgggattacagacatgcaccaccatgcccggctaatttttgtaattttagtagagacggggtttcaccatgttggccaggctggtctcgagctcctggcctcatctgattcacccacctcggcctcccaaagtgttgggattacaggcgtgagccactgcatccggccttctatttttaatttagcatcctcaaataaatcaatttaacttctaaaaatgtgtgcctttttgttttaataacattaacctatttttttatttttgtaaatttatgaagtacattcttcaaatgtaacaatttagttctacttcaagataaggtatagacaactgcaaaattccactgtccttacgatcacaatcatgaagaggatggagctgcagaatctgagcatataaagacttttatgaattctaacgcccaaccccaacttgagcattcattgcgctggtcctaattcacattcaaacgccctgagaatggagctaacaggatacactgcacccaatctcataggcacacacaggatagatccgaataccactgcaaagacttttaaaatgagctgatattaagacctcagttcacagaaagccaaataaataataaacatcttctgttggatacaaataaaacagagtctcataagataacattcacatttcgagggtacatatcggaactactgagaatacaaggatgagctgcaaaaatctccacttgtctggcaaatgacaactcagtggacaccaaacactgaataacatgtacagtgaaattatctgacaaagactttaaaagagacattataaaaatactcaaatgaggccaggcacggtggctcatgcctgtaatcccagcactttggaaggccgaggcgggtggatcatgaggtcaggagatcaagaccatcctggccaaaatggtgaaaccctgtctctactaaaaatatttttaaaaaaaaattagccgggcgtgttggcatgcacctgtagtcctagctactcaggaggctgaggcaagagaatcgcttgagcccgggagacagaggctgcagtgagctgagatcacaccactgcactccagcctagatgacagagcgagactccatctcaaaaaaaaaaaaaaaaaaaaaaaaatactcaaatgtgccaggtgtagtggcctgtaatcccagcactttgggaggctgaggtgggtggatcacttgaggccaggagttcaaaaccagcctggccaacatagcaaaactctgtctctactaaaaatacaaaaaattagctgggctgtggtggtgcatgcctgtaatcccagctactctggaggctgaggcacaataatcgcttgaaccaggaggcagaggttgcagtgagctgagatcgcaccactgcactccagcctgggtaacagagttgagaccctgtcttgaaaaaaaaaaagctcaaacaagcaaatgctgacacatttgcaggaaaatagaatataaggcaagaaatttaaaatatagagaacaaaatggaaattttagaactgatacatacagtgaccaaaatttaaaaggtggtgaatgcactcagtgggacgacacagataacaacaggtgaacactccagcaaatttgaaaatagacaaattaaaattacccaatcagaataatggaaaaaatgaaaagatgttctaaataagtagaatatcagggacatttaggaaaacataaaagtctaacatttccacaataagagtctcagaagaggaggaaaaaaacaaaatataatattgattgattcaacataaatactatggtttatttctagatggcaaggaaaatcacatgtaagaggtttccatttaaaagaattccactattcatcaaaattttcatctattctcaagactgttgatttcaaactaggtttagagtagcaaagcatatgaattttacagtagaagacatgagaaggatataaaagtttgttttctgtattctttcaaaattcttattttgaaggccttctgggcatataagctattggaacttgtcatcacttaaactatttcctataaagatgaaaatcaggctaataaaaagtatttttagaaattaggctgaaaacctctaagtttggtaaaagacataaaactgcaaatttatgaattggagcaaattccaaagggaataaaacaaggaaactcatccccaacataatgaaatggctaaaaactaaagataaataccttgaaatctgacagaaaaatgacacactacatacagggaaacaacaatttgaatgactgcagatttctcatcaggaaatacggaagctaaaaggaaactgctgaacagaaaacaatgtcaactaaaaatactacaagcaaaaaacatcactgagaatgaaggtgagaaaaagatgtcctcagaggaagcaaaaaataagagaatctgtacctatcagaaccactctaaaagaactaaaaaacgtctatcagaggaagtggaaatttgcagaacgaaatttggaaaataatgaaggaagagcaacagaaatggtaaatatctggaaaaacataacagattactcttctcatgagttttttaaatcttctgagtgattaaaagtagaaaatatataataatttattgatgggttttaagatacagaaagattatgtagaagataactatatcctagatgagaaaaggtaataggatctaaatggtgataaagtgcctagattccactttaagtggtacaaatgtgataacagtagaatagaaaagacataacaaactggctgactgaggataaatcctaacatattaataattacattaacgtaagtaattgaaatcttccagttaaaagagactatcagaatgggttcaaaatacaccataaaaaaaactgactcaaccagatggtgtctactaggaacttgttttaaacagattaaacataaaaggatggaaatatgtgtgccacgaaaacattaatcaaaagacagctgaaatggctacaaaatgacagagtctatggtagaatccaaatgtcagagttggcttattttttgtatggtacattgccaggaatgtctgtctcagaataagctgaattaccctcattttctttttggtggttctgtggagttgatttaccacatttcatctcagtattccttggagttgaccatgaacatttaacccaacaactccttgtagcaggctacacaccagtgggaaaatattttctgctcatgtttgcattttctcccatttttgtgctctctttcagcaaatacatttacattgttctaataacagtagccatagataaagtgttaaagtcctaacatacaaaaaaaaaaaagactgtcatcatgtatgccttgagtgtcctcagctgagaagcttttgttagcttttctgcttttagttatgagaaggtgatacttcaaacggagtgtccataggaattatttttcacattaatcaggaaaagttgcctttccaggccccatccttcataaacacacctatccggatgtcctttatcctgggtcttcaagaatcatgtcaatggataaaatagtgatatatcaagcaatggttggaaaaaatttaaaaggaatattactaccttcttcagacattcttgaggaaaatgcatgaggatacagtcaataggtacatgccaggttacaagtctgtcctgaaagcctgtgtgatagatgttacccagtcttcttctgtcttgaacactgaaatcaatgatcacatttctgtttatccatttccaatgagaacgctggattctctcttccagactacctaactgactcattttacaaattctgctgtctaagataggacacgaggtaagggtccctttcactaatgcttctgaagagcacgtccagggccaggtcccctttcttctccaccatgctcagcaaggcctcattcttgctctgccgtgtcttttcctgctccaccagctccttctcattctcagtaagaacctcattgtcttggagatcatcgagcacccctttcaggtcccccatcctggcttggagttgccggtggttctccttcacaaaggctgcacctggatgaaagggggagtttcagactttgagaatcgttcacttacaggattcaggatctataccaagcttagagtcaaaattcaggggtgggagattgctccttgtgtctgtagcttaatttgtggacatacaaaatcacacacattcacagagcaaatataccctttgcagtatcaaatgcattgaggtgtctcaaataatgtatcttcctcagtcctactcctctcatccatttcttgaagcctgtttcttcctagttggtgtttttcattgaaatcctagacagagctctatcttgctgtacatacatttatatataaatccctctaacaacgaaacacaaatcttctagttcatacattgtcagaaactgtgcatgatgctagaggtatggagaaggattcagctggatccccaaagcttagctggcagagctatgaaagaagagatttaactggagacatacaatgcatagaaaaggaagaacaggggaaaagatacagacttttttccatcatgtagactcagggtttacgttgtgccccatataatgtctgtataaacttggccaaatcatattacttccatatcacgtggtttagaatgcatggaggttgaggtgtgattttgactcaagacatgttctggaccagcttcctgtagactgagctactaagctttgatttcaacgtgcaggcaacaggtgctatattttgctccacatcctaaacattatatttaggaagggtagaagccttttgttggtgctgctcagcctgcagtcaccacctacagagatgttctttgatttattttaggacgtcacctttatctgattcttaaccaagctccttagctgatcctcattgcacctccagatgtgaggcatgatttctttttatttaatctgcctcaatggccttccaggcaacaacagctaggaaatggcatgattgccatctcagaaggtgctctcttttttctcccagtggtctgttttgagacatgagttcggaaacttacactgtgtggagcctgacaatgaagccaacaatatggaaggcgggacgaagacatggagaaacattcctcccttgtgatgttgtttgagcccatgaatcagcctccctggagtcagtcccacatctcttccttgaactcgcctgagccatgacactcttgataatttcactccatttaagttggactttctgtcatttgccacacaagactttacacagatccagaggacattgcagattgctgccttgggtgatttttaaaattaacgtggacatgaagtcatcaggagacaaggagttccaaacctggatttattgcttactagatgatggaaacttggtcctctcagtgttaactctattttatttatttacttatttatttatttattttgagacaaagtctcactcttgtccccaggctggagtgcgatggcacgatctcggcttactgcaatctccgcccctgggttcaagcgattctcctgcctcagccccccgagtagctgggatcacaggcatgtgccaccacgcccagctagtttttgtatttttagtagaggcagggtttcaccatgttggccaggctggtctcaaactcctgacctcaggtgatccacctgcctcggcctcccaaagtgttgggattacaagtgtgagccactgcacccagccaactctttatattaaataatgtaaataattttttctctgctatatactaattccagtgtccttaacagatccttggctgatatctgctcttcacttttacaacagccccaccgttccccacttcctattcattcccaacccacactcaatcatccacgctgttttgaagagccaacacattgttatccatcctttaatagttactcttgcctttccgtctaaagtccaaaatatttcaacttttattcttggactttcaactgccagctcttgactatccttctcatgtcacctttactctgtccctctaacagtttaattcacagccatatcaaactactttaacttagagttccccagacgcaagatattaaatatttacccccaataatttgctgttgtatgctcttttgtgtctacatgatgtcctcacgcccttctgggactaaatcatactcattgtctgtatttatgacatcagtcattcttggcagatgacaaggatggaaggaatggagccttgctgagagatgctgttacagcaggcagctcgtcagatatgagcagggcaggagaggactcctcaccccaccagaaatgtcaggcaaccatcaggtgatggtcaggcagttgttacaccgtctctctaaaataataattggttgcagccggcaccagggaaaggccgtctcctgacagagagaaaacacctgaaactggtgatcagcagcttcccaataagatctcgggaactgggccagtgggctcaagaatgtgcattaagagcagagtttaactggcctataacctcttacggaggttgagctggtaagggaagaatgcctcaagtgagcatgcgtatgactccaagaaacacactgcgcatgctccccttccaagcccctgcgggccactatgcaggcgaccagcccaccccaggggaagaatcagggaagaagggatgcaagaccccggaagtgtgccaacatattaaaccccaagtcaaaaggtcaaaccgtgcacttgtctttcaagtcaccccctcggccgtcttccaagtgtactttcctccttcctttcattcctgctataaagcttttttttttttttttttttttttttttttttttgtagaccgagagtcttgctctgtcgcccaggctggagtgcagtggtgcgatctcagctcactgcaacctctgcctcccgggttcaagccattctcctgcctcagcctcccgagtagctgggaccacaggtgcccaccaccacgcccggctaattttttgtatttaagtagagatggggatttcactgtgttgcccaggctggtctcgaactcctgagctcaagcaatccacctgcctcggcctcccagagtgctaggattacaggcgtgagccactgcgcctggcctcttgctgtaaagctttttaataaactttctctcctgctctaaaacttgcctcggtctctccttctgccttatgcccctcagtcaaattctgtcttctaaggaggcaagaattgaggttgctgcagacctatacggatttgctgccagtaacgttctggtgccatgtcacttggataccttccactgtcactcaaagaccccttgatgtctcatacatacccttggctttaatgtaaacatttcacttacctgagaaaggaggaggggctgatgcagctacaagctggagatccactacaaaagagggaaaaattatatgatgagatgagataaatcatgtacccttatttagcttttctagtctttgatgcaaccaactgaaataatttaattctacatatgtcataaggctcttgttttgcacactaatacactgaggaaaccccattaagttgtgggtcactcactgacaattcagaaaaggcatcggaggaagaaacacatttttccaatttctttcaacttgcaggccaatatcttaggaactatggggctacaaaaacatatcatacagtgctacataaattacagtcaaagtgttttagacatgaaataacaacattacatgagttaattaaaacacgtgttttttggatgtgattgtaccaagactgttgatggtgcagaaatttgggtacccttataagttgatagaagatttgctaattggagctaccattttggaaaataattaaaaaaatttcccatgatgccttcaatgtggttttgcactttcatctagactccttgatgttttcaaagttcagatgaattttgcaacatgccccccccaccccacctttggcagcagctcagtcaccatgtcaccaagacagaataaatatgagcttcccatctcctgtgaggtctcacaattgagtttctggtcatttgacttctgggcagaacatgagctgccttgaaccagcatactcatccaagacccagccatccacaatctcccccatttcatctagaatttgctatcaaaaaaaaaaaagcatgattgtgacacctggaaaaaatcttttttaaataaaaaagtaaacaatgtaaaaatattctgatgtttacagagaaatggagagtgtggtggcatttgcttactcaaaatatgtattgcatgttggctgtgaactagattgcattctagccactgataatgcaggcaatggggaatccgacatctgcacggcttcttcgcatattaaacatcacaaggagagctaagaagttgcacaaacaaaactctgacaatctgagatgctaagacattttaccgactggagggaggaggcggggagggtgcatgtggaggtgcactcatgagatgctactcatgtggagatgaggcctgggtcggctgagcatcatccaaccctgcaatgtgcctggaaactccaagtgcagtcccagctcatgtgcaccgcctcaacaagagggcagtttgcccagagaaggggaggcacagccatgaagctgatcttgaactctagacaccattgcagggaaaggaaggtgatgggattgtgaggattcagtggaggaaggaagatcagtgactgaggaccacaaagagcagacagtctacaccagtggtccccaacctttttggcacctgggaccggtttagtggaagacaattttttccacggactggagagggaggggatggtctcaggatgattcaagtgcaatacatttattgtgcacctaagttctattattacattgtaatgtataatgaaataactatacaaacaactcaccataatgtagaatcagtgggagccctgagcttgttttcctgcaactaggtggtcccatctcggggtgatgggagacagtgacagatcatcaggtgttagattctcctaaggagcatgcaccctagatccctcgcctgcacagttcacaatagggttcgcgctcctacgagaatgtaatgccaccactgatccgacaggaggcagagcgcaggcggtaatgcaagcaatggggagcagctgtaaacacagatgaagcttcgcctgctcaccgtccactcacctcctctgtgcaacccggtttctaacgggccacagaccggtaccagtccctagcccgggggttggggactcctggtctacacagtcaacactgtgacaatattgccccaaactactaaaatacaacagcagcaacaggcaaaactcagttgaaattgttgaaaaccattccacaacatgtactcacacatttgttcaactatgtccttcttcctgggcattcagtttggtttcatttttttcccaccacagacaatgcctcaaataatatcactgcatacaacttatcttcatatgggtgcttttatgttatagtatggaattctaaaagtgactttttgttcaagagacttgttttaaaattaatctgtgcccatacaactacataaaaggttaaagcgatttatagctcctatgcaaatgttaatatccttcccttcatagagcttcattgaaatttttcatgctgtgttacccaagacaaggatctgctactattgaagatactgatttctgcatcattgtagttattcaaacagagcatggcattttacaaatgtattggagatataaatgtatctccagagattcaaggaactatcaggagatctttggcaaattgtctgggagtttctaaactttaaaaaattgtgtttatgatgttgagcttctgtgaatggataaaacattttccagaactttttaacagattacctcagggaatatgacaccccgaaaatgaaaagcatgagtatggaagaaatgattaaattgtgaagaaagtggaactaaatagtccttatgtttcttctgactcttagaatcttctgttctttaccccctaggttcgagggtttccacccctctcccaggccccttgagcatttcacttcctagagatgaacaaatgccaccattgttgtgttatcacactgataatacactgacaatagatttctcttttttttttcttttttggcaagaacattttattttattcaaactattttttttaatttaatttaagttctgggatacatgtggaggacatgcaggtttgttacaaaggtaaacatgtgccatggtggtttgctgcacctatcaaatcatcacctagatattaagccctgcacgcattagctatttatcttcttctttttttttttttttttttttcagatggagtttcgctcttattgcccaggctggactgctgtggcacaatcttggctcactgcaaccccctcctgggttcaggtgattctcctgcctcagcctcccacgtagccaggactacaggcatgtaccaccacacctggctaattttgtatgtttagtagagacagggtttcaccatgttgagcaggctggtctcgaactcccgaccttaggtgatcctcccccctcggcctcccaaagttctgggtttacaggcatgaggcaccgtatctggccttttagctatttatctagatgttctcccttcccacatcacccaaaaggccccagtgtgtgttgttcccctccctgtgtccatgtgttttaacactgacaatagatttcttttcttctctgggaaagaaccataaacaagatttcttctttgaaatccaaggatagaggtacatgatggatccctgtctaaaaatgccagcctcgcccactcacctacctggcttcacctcagtatcccacaccaaagtcccatgtcttttttcagtaatctcaagttgaatgggttccttcatctgcccagcatagaattttgagaagtgctgaatttctccagggctcctgtaggacaatttcaactcctagaggaaacacatcagttgacttgaagcagtggagggtggaaaggcccggctccctacagtgaactggccaatggaacttaacccgtttcctgtgcaatgtcatggctggttgagtgggaaacagagggagagaggtaaacagctctttacatttacaatgttaggaaatgcttttataccaggaagggaagaataacctagctgtcaacaccacatgagtcagagaaaaactatctgagctaccaactgaatacaaacgtcttagattttgagggttttgaggcccctcattaatgatgcgaccagctcagaatccgagattctatagagaagcaagaaagcttccaaagcagccccatcaggtctctctgagcctcgctgggaagccggggtcagataagccatttcaggtccctctctgttttgcacccagtctccccaggattcctaaaaaaagctgccctggggagcaagaaagccccttatgcaggacagaattaggaaaagcttagctcatgcaaatctctagtttcttcagaaaacaagccccccgacccagctcttggaaaatagggatttaaaaaattacaaagggtgagattgttggctggaatctttttaaatggaagatgactctgaggagagtttacctcgctcaagatcatcacctctagggcgggcgcggtgactcacacctgtagtcccagcactttgggagactgaggtgaccgattgcttgaggtcaggagctcaagaccagcctggccaatatgttgaaacccccatctctactaaaaatacaacaattagccaggcgtggtggcaggtgcctgtagtcccagctactcaggaggctgagg[131 bp omitted]tcttatctcacatttactatgttgtatcattctggatgaaataccctgcattttatttatttatttctatatcagcaatgtttatggaaggttctgcaacagccaagaatgtatcttgcctgaaggacaaccaaacttctggggaaggcagtccctgcttcatattaattgctgtggagtttatcaaggaaactgggaactaaaatcagagcaaggttgggcactttattaaattcttatgctctagtatacttagaaaaagatcactgaactgatgtctgcaataagcttcacatcttgttgtctatatggctggaaaaatcatttttcctattttagccttagtgtccaaaaaggagacatgtaaatactgacacctaaccctcttgtttctcacctcttccaaggtccgcaaacaggaaaaagccatctacgccaaaacaataacattggtccgtcccattctgaattaaagaccttgaaatcactgggatgtgttttcccattaaaactggaaaacaattaaatcttgatactttgttctagagatggtatattgtgctggacaacctcatctttattttagagaacatatgctgtgagacatctttgaaaatctatttggggccaggtgtggtggctcgagcctgtaatctcagcactttgggaggccaaggtgggcagatcacgaggtcaggagttcgagaccagcctggccaacatggtgaaaccccgtctctactaaaaataaaaaatcagccgggagtggtggtgcatgcctgtaatcccagttactcaggaggctgaggcaggagaatcacttgaacctgggaggcggcggttgtagtgggccaagaccacaccactgcactccagcttgggcaacagagcgagactccatcaaaaaagaaggaaagaaagagagaaagagggaaagaaaggaaaggaaaggaaggaaggaaggaaggaaggaaggaaggaaggaaggaaagaaagaaagaaaaagaaagaaagaaagagagaaagagggaaaaaagaaagaggaaggaaggaaggaaggaaatctatttggaaatatactagctttaagttggttaatactctttgaatcagtaatttcatttaggacactctagccctgcaggaaaaatgtaaaaccatatgaatggaaagacttcttgccagggcacttcttgggagaaattacatgcgactaaatgttgaataatcatgaaataatgaaaaaagctctagggatttcgctacatggcatatcatgtcccagtaaatctgtatgtaggaataatttaaattgcacagaattatatagtaatctccatttaaaaatatataaaatgaaatatataacataaaatcagctcttccttcaactaccttaacaaatacatattaagtgcgttagttaggcaagacatcaggactgaagataattataacagggaaatggaaatttcagtttgggaaactcaatgtgtagttttaacctaacataagtatgtcaaatactaaaatgttacctctgccttagggtcttggaaatatgcaatatgattaatactatttttctataatttcaatttttttaaagggcatatttgtgattaataaaagaaaaatgttgcattttgctaagattcttccatttgtttcagaaatataaaacactctgaaacctgctgagttgggtttgaattctactaaccttgggcattactttcaggttagcagaattagacacaatataactggaaccaaagttcaggggttccattgggggcgaagtctgcaggcgcacaccatggaagcgatcttcctcatcatctatcgcctaaggaagaaggggcagaaacattagagagcacaaaaaatagtaaagcaagtagtggcataaaaagttatttatatggtatattaagtagcacgtaggctatgattcaattgatataaagattaaggtattcaactgatataaagattgtgataggtagatacacagatatgaatgaatatgtctctatgcacaaagagacatattgatgaaattttactgaaagatatctcagggccaaaggatttcttgtgaatgtgaacttataaattcttgtatagtttgcttttatttttacactgtggaaagattggctgcgtacttatgaaagcacaggacagaaggacttctttttggtgcctcagcagagaactggtagctcagctgtgtctgtgaacacgtctatgatggacaagggtagagatgttacttctctccgtcacagggctgctgtgagatgctcaatcacctgaccaccagcgagcagaaacagtcacctctgcgaggcccagcagccacagcagaaagcgagacctcaaaactatctctaagcagccaggcacggtggttcacacctgtaatcctagcgctttgggaggccgaggtgggcagatcacaaggtcaggagtttgagaccagcgtggccagcatggcgaaaccccgtctctactaaaaatataaaaattagccgggcgtggtggcgggcgcctgtaatcccagctactctggaggctgaggcaggagaatcac[134 bp omitted]attcaaacaaaacctttctacctttgggaagtctcaggtacaactcaatagagactttgtagaattaatgagcaaggaatttatgctaaaaacaatgactgtcagtgatattattagtccagctgatcgactcccttgcaggataatgaccaagagggacacaaggggactttggggaagctggtgatgtcttgttgcctgttctaggtgctgcatatgtgagtgtgtcaactatgaaaattatgaagcaat[133 bp omitted]gaaaccccatgtctactaaaaatacaaaaattagctgggcgtggtggtgagtgcctataataccagctactcgggaggctgaggcaggagaatcgcatgaacctgggaggcagagtttgcagtgagtcgggatcgcaccactgtactccagcctgagcgacagagcaagactctgtctcaaaaaaaaaaaaagaaataaagaaatgtcagcagatctctatgaagaaaaggatggcccatggagaaaacctgaattgggcctgggaaatcaaataaaagaaaaatttcatattgtattgagcaaagagatgaaactatgatgggggtaaggcagagaagggatgtggagaactatccaggaggcatcacatatatgtttagaaaaagaaccagtttccgaagggtcaaaagaaactgatgggggaaagaaataacatatcataccatctctgatgaacaattcttttacatgaacagatatgtttaaattaaattatagtaataacagattagaactaaatcaccaaataaatccatatcacattgctagggttatgattacggacagatttctgtaggtgttgagagacataccactggattaattttcttaaccttctttatttgttatagttcttatcatatgcacatatatttttcctatagcattccatgtaatatctttggttgtcatgtttttgcctcttttgttcactgatgtatcctcagcctctaaaatagtgtctggaatatataaggcacacaacaaatatttattggatgaataaatgggtttccctggaacagtactgttgaatagaaatgtactgcaacccccaaatgcaatttttttttgagatggagtctcgctctgtcacccaggctggagtatagtggtgtgatctcagctcactgcaacctctgcctcccaggttcaagcgattctcctgcctcagcctcctgagtagctgggattacaggcgcatgccagcacgcccggctaatttttgtatttttagtagagacggagttt[136 bp omitted]agagaggcagatgaaatggcttttagtaatgtatttcatttaactcacaatatcatttaggcatgtaaccaacacaaaaaataattgctatttatgtgcttcccttcatattgtcttccaaatctgtgtatgtgtattaatatgtgtattaaaacttaaatacttaagttttagagtacatctcaactcacatactcaatagccacatgctattgccggccattcaagcctatagctggccagtggttatagagttgaactgtgctgctcttgaaatagggcagggaagttctcagtgcaacaatagatatttagagtttgattatggtttgaagtgaagaagaggtttctcctctcttcttcccttatcctaccctgaatagggaagaagcagacagaccacttttcattcaatgggtcaacaaaatttcaagag[136 bp omitted]acctcagcctcccgagtagctgggactacaggcacctgccaccgtgcccggctaattgtttgtattgttagtagagacggggtttcaccgtgttagccaggatggtctcgatctcctgccctcgtgatccgcccacctcggcctcccaaagtcctgggattacaggtgtgagccaccgcacccggccctccttgtgcttttaactaatttatgattaaacagaaatggtcctgcccatgatatagagtacacaatttacagagaagcagatcataaataaatagacatgtgaccacaacagagggaaagaagagggtacagtgatcaagaacaatgggagaactggagggcacggtggctcacacctgtaatctcagcactttgggaggctgaggtgggcagatcatttgaggtcaggagtttgagaccagcctggccaacatggtgaaaccccatttctactaaaaatacaagaattagtggggtgtggtggcgcatgcctgtagtctcagctactcgggacgctgaggcaggagaatcgcttgaacccggtaggcagaggttgcagtgagctgcgactgtggcactgcactccagcctgggcgacagggcaagaccccttctcaaaaataaataaataaagggagggatggaccagactagagggcctactaaaggctttcggaagcagaaatctttaggcaaagactagaaagagactagaaagatgagcaggagccagtcttgcaagggaaacacaaagggtaagagcccagaagcaggaattcttggagtatttgagggatgaaaattcaggacagaagtgctggaacataatgagtgagaagagagtgataggagatggataactgagatgttctagggtcacaagaagtcatggcttcagctgggcacagtggctcacacctgtaatctcagcactttgggaggctgaggcgggtggatcacctgaggtcaggagttcaagaccagcctgaccaatatggtgaaaccgtgtctctactaaaaatacgaaaattagccgggcatggtggcgtgcgcctatagtcccagctactcaggaggctgagacaggagaattgtttgaacctgggagacggaggttgcagtgagctgagatcacgcccactgcactccagcctgggggacacagcaagactccgtctcaaaaaaaaaaaaaaaaaaagccatggcctctaggccatagtaaattatttgattcatgttctaagtgtaacgtgaatccattaaagaatctttggccaaagtgtgatgtagtaatgtattttttaagtgtattagaattaaaaaattttaattttttttctttccaacatttattttatttattgatttatttaagacagagtttcgttctgttgcctggagtgcagtggcaaaatcttggctcactgcaacctctgcctcctgggttcaagcaattctcatgcctccacctcccaagtagctgggattacaggcatgtgccatcacatccagctaattttttgtatttttagtacagatggggtttcaccatattggccaggctggtctcgaactcctggcctcaagtgatctgcttgcctcggcctcccaaagtgctgagattataggcatgagccaccatgcccagccccatcatttattttaggttcaagaagtacatgtgcagatttgttgtatgggccaattgcatgtaatgggggtattacttattttgcaaaaaatctccctgttcctagattttaaaaataggtggtaaatgaaaaacaatggaaccagtgagataagcttgaagactttatccatatttctagcaaaaatggcagtggatggcactaaagctggcagtgaagctgaacggagtaaaactggttcaagttatgctatgaaaatgaaaagaatcaaaattgatgagatgctggatgtgggaaagaaaagaaatcgaggccgaggggggcagatcacttgaggtcaagagttcaagaccagcctggcaaacacggtgaaccctgtctctactaaaaaataaatacataaataaaataaaaaaatacaaatagctgggcgtggtggcagacaccataatcccggtgaggcatgagaatcacttcacttgaacctgggaggcagaggttgcagtgagctgagattgcaccactgcactccagcctggtgacacagcaagactccgtctcaaaaaaaaaaaaaaagaaagaaaagaaaataagtggaggaattaaagatgaacactagagtatggcttgaatgactcaatgaaatttagtctctaccctgaatggggaagagagttgaataaatcgcttaaagggagaaagttgagtcaatatatacaattagatatgccaaataaacactcatatggagaggggaggttggcggttccaagttggagctctggagaatgttcaggactggagatatagactgagaaatcctctgcttgtggggaattcagttacgagacgaagaattcatcaagtccgtcagtgaagacagaaaagagaaaggagagtccaagattcagccctggaaactcaatattcagagaaggtttcagagcaagaacctgcagaggcgatttgaggagagactcagaaaagtcacggagatgccaggagcagtggtccatgcttgtaatcccaacactttgggaggccaaggcgggcagatcacaaggtcaggagttcaagaccagcctgtccaacactgtgaaaccccatctctattaaaaatacaagaattagccaggtgtggtggtgtgtgcctgtaatcccaactactcaggagactgaggcaggagaatcacttgaacccaggaagcagaggttgcagtgggccgagatcacaccactgcactccagcctgggtgagagggctagactccatcacaaaaaaaaaaaaaaggaaagaaaagaaaagtcacagggaaattgggataatatggtgtcgcaggatcatatagagcagagatccccaacacccgggccgcagaccagtaccagtgtgtgagctgttaggaatcgggctgcacagcaggagaggagcagtgagggagcaaaccttcatctgtatttacagccactccccatcactcacattaccgcctgagctcctcctgtcagatcagcagtggcatcagattctcatacgagcgtgaaccctgctgtgaactgcccatgcaagggatctaggttgcacgccctttatgagaatctaatgcctgatgatctgtaagtgtctcccattacccccagatggaaccatctagctgcagaaaaagaagctcagggctcccactgattttacattatggtgagttgtgtaattatttcatcatatattacaatgtaataataatcgaaataaagtgcacaataactttaatgtgcttgaatcatcccaaaaccattcaccaccctggtctgtggaaaaatggtcttctgcaaaactacttcctggtgcctaaaaggttgggaactgctgttatagaagagtgtttccaaggaagagcgtggtcagtggaatagcattccactgagaccccaggtaagaatgagttgacacaaagtcactgactgggtgacgctaaacagagccattctaaggaagggtggcaaggtcatccacacagagagatctgggaacagagtgagaactgaggaatatggagacttcgggtacatggagctgttgatccattcattgagaagcataagggaaaaattggaagtatgactgcaggagggagagcagtcaaggacagcatttccaatgtgggggccattctagattttggcgggtggaagggagtgatgccctagggtaggagagattgacggtggaggggaaagaggatgcctcgggtgtggctcccacataagggaagagggaaagggacccaagactcatgttaagtagtgtccttgtgtacgaagagggaggcggccgggcgcggtggctcatgcctgtaatcccagaacttcgggaggctgaggtgggtgcatcactttaggtcaggagttcaaggctagcctggccaacatggtgaaacctcacctctactgaaaatacaaaaattaccaggacgtggtggcacacatccgtaatcccagctactcgggaggctgaggcaggagaatcgcttgaacccgggaggcggaggtttcagtgagccgcaattgccactgcattctagcctgggcaacagaacaagactctgtctcaaaaaagaaaaaaagaaaagaaaagaaaaagaacaaggaggcttcttgggtttcagaggaaagaaataggtgaagacgggccagaaacaggctcacagagctgacagtgaaacaatgaggtttttccatcccattttgtttctagtatatcaataaggtatgaagcaagtaagcatatgagatttgggaatgatgaaagaagaggcactaagtgaaggataggaaaagggtgggctcagaatgaaaacagaagttatgcaagaattcactggaatgtatgtatttctggcccactctaggaatagtcatctttatcattcagattaaaatgttttctcctgtatttaagtacccacagttactcaccaccctaagtcctgacaggcaggcacctgcctctcattcttgggatgttggagcattagacggggggacgatacaatttaatgtaatctttctggcataatcgccccacctaggctggaaggacagaagtgggactttatccaggtgcacagcagctacagcaaccagcacgtctgcttcatcactaactcagaagagagtgtgggaatatgagcctttaataagtgcattagagggagatgctactgaacaggaggagggttactccagagatgtgagtgtgcctgtcagtgtaattcacatattatccatttaaaatttggtgagaggccaggggtggtggctcacgcctgtaatcccaacacttcgggaggccaaggcaggtggatcacctgaggtcaggagttcaaaaccagcctggccaacatggtgaaaccccgtctctactacaaatacaaaaattagccaggcatagtggcgggcacctgcaatcccagctactcaagaggctgaggcaggagaatcgcttgaacccgagaagtggatgttgcagtgagccaagattgcgccagttcactccagcctgggtgacagagtaagactctgtctctaaaaaaagaaaaaaacaacctggtgaaaaaatctctgcatcttctctgtcagctggtcccccaaaatcactaactttctccttcttgagagccagaaaagggaatttcctttttcagtagcactgaatcactactgaagatggttagggaagcacatagctccagagtcagcaccttggatgaacctcaggaagggtgactcctgcttctgtccatgaaaaccatgccttgccctttctgttccacgaggaactggaggggccaaggggataacctggaaatataatcgtcatcttctctggtctcctaaatcactcagcttacctttgttagcaaggcgtcgctggggacaaggtacaagtggaacttaatatcttcggggtgggggtgataatagatcaatgtgttggaagtgatggggatggagaggcgagtcccactggcgatccgcagcaggatgcccatcagagagaagctggggctttccaggacagcatagaaaggctccacccgggctggatgctccaggaccatcccttcattcttaaaatgggcaacgagaaaccaggagacgtccacctcacctgctgcaggagaaccacaacagcagtgagacggcacgcaccccagcggcccccacagcctccgctcaccccacattaccttggagggagatgaagtgggggaggtggatttcggcgacagcctcctctggctctgcagtgacatcaaacaaggggccgcccaccagccactgttcatggtgctgcaggtccagggccaggtgctgactccaggaaccaaacgcaatcgtcactgtgacctcatcccttaccaggaagccgaggcctgtggctgaccacagataccagccagcagtggggaaccaaacgctgaaaggagccagagtgatgtcatgacgggagaaccccaggacttggatttaagcagcgatgtgcagagggaggtgggatttgaagtgaggcaaggttcaggacccatctgcgactttcactacattagaaaacgctggggagttcattaacctctctgggccccaatttctctgcattctatatatgttgaaattaaaataccaacttcacagtgcatgaaataaacatattattgatgaaattttagctatcataagggatggaaccgatacgcttccttttgtatttatatttttatttatttatttattttgagacaaagtctcgctctgtctcctaggctgcagtgcagtggcgagatctcatctcactgcaacctctgccccctgggttcaagagattctcctttctcagcctcctgattagctgggactacacgcgggtgccaccacgcctgactaatttttgtatttttagtagagacagggtttcgtcatgttggccaggctggtctcgaactcctgaccttgtgatccgccctcctccacctcccaaagtgccgagattacaggcctgagccaccacgcctggcctacacacttcctttatatcagagtggttttcaaatcatcagcatcttccattcttacctgtatctgtttgtgctcttatcaatcaactcaacatccacatttccttcaggccccagaaactgacgatttttataatcttcttcgatctcaaaacagactttagaagcataagaggaaactatttgattctcttctgagcaaatgtctcctgaaaagaaaatactagacatgtaagaggtaaagggttggaagaggcatggcctgaaggactcctggaggctgaattgcacaggtgctgttgggatacagatatcgaatgagagctgagagtgaccagaatatgcagtttcgcttctttgaatccagacaaagaaaggcacaagaatgttccttgtcatgactaaacgtatacaccaaattccataagactttctgggaagccaggctggacagctttggtgggaggcaccatttgctgaggactggaaccaatgcacctacatttctactggtccgaaatagcagaagacactttctgctggtgaggaaagtccaggtcagaaaagtatcgaactccaaagatgcagaggcgaaagagcgtgcatccttcctaggccctgctgctgtccccagccaccaggaccacccactgactcccctgagcatttccatgccccagcagtgacaggcttacatgtccccatttaaactgcacagtgcactgtggcaaaggtaagggaaagcactcctgatctgcacaaaagactctaaattgtcttcttcacataaaatcacagaacatttccatcaatccacacgcccttcactcctctccctattagcccattacctgaatcttgtccctctgaagattcctgctcttctgatacactggaggttgggatccccatgttacaaaaagatgaaaaacatcaagaatcagttgatgaagatgaagacgatgttattgaaaactagagctgcactgtcccgtagagtagccgctacccggatatgctatttaaatttgtatgaattaaacttaggtaaactttagtttctcagttgcactatccatatttcaagtgctcaacagctacatatcactcacggctataacactgtgtagcagagaatggaacactcccgtcatcacagaaagttctcttagactgggcggatctagactatcaagaaatagaagacattttgaatgaagatatttttatccacatttataaataatagagataacacactcccttgagccaaatgtgtcttgacatctctccttcttctctttgtattatgcccacgttcaatgtggacacagccagattctctggcttaaattgattgctccgattggtatcatacgatgtcggaatcaaagactgaagcagtaattcaccaatgcgtaaaatgtatgcatttatattccaaggtaattccaaacttgaccacacctgggaagctttaaaaaccacccaataccaggtcacagcccacatcaattgaatcagaagtctggaggtggcaccaaagcatcggcgctttcaaagcctcacaggtgattccaatattagccaatatgggttctatgacatacagcgtgagccaatggttcgtcatgcctctggagagaaacctgccctaacacaggtgataccttctggagcaaggcaaccaactccatcaaattctctgcctttgatccattccttgagatatctgtttatttcgacgtgaaagagaccagcagagaaactgacacgtggattaggtttaaaaagaacaggtacctagagaagtgggatgaagagaaaggctttacagcgcttttctcggaaggattctgtgggcaagccaagcatggagagacccctgggctgacatcctaagactggttgctgtctgcggctacacattttgctatggattcgggtagctacaggcaaagcagcaagagtaaacatgccattttatattctctttcctggtgcatgtgcatgctggagtctgcctgctgaggaggggtttagaaagtgggaggaacccagcgctgaactgcagacagcgcatcccagatcatgagagctgacggttccattttcagggcttttgcaaccaagttgttcaacacaaccattagtctaaattaaatgatacaagctaacatttaaataaatcatattaaaaacaaaagtaatacatattaaaacataccaatttccagtcatttttctacacttttcagcagtctatgcccttgaggttatttatgtctcttgtatctgtgtggtgaaagcaggatgacagacttctgcatgtgttctttcaactccctcatcaggggcttcacgttggtagtttgaaatctgccatgatggggatattcaacccttggaaattggcataccctacaaatagacgcattctcccctccccggtgttaaacctcaggaccccactgtggccttcagcctcatcatcagccagtttcctagagaattaggttggttttatgtattgagtaacagcttaaccaataacccactggtcttcgattgcattgctcattgcctttttgtgtataggttctctagacacctccatggaagaaaacctcattgcttaaggtttgtttcaaaaatttctggattcattgctagtattgcataagctcattcattctcccctgagttcgatgaaaaacacccaaattcctctaattctcatgttcctctgtgatattgagacacagcgtccaatagttttccaacggaatagcttttcttacctgggaatgtcccccccagatagttgacactcaggaacagcacggaacaataatggctctgcctctgtctcatcatcttcttggaaaaaatgtgagatgtcacaaagggtctcagaaacacagggtagctccctgtataccctggaaaacaacaacagaatttttactatgaatataaggtaggtgcctgatgatagcataggctgtgcaggaagattttatgttaatagccatagactcaatattttatcttagggaagtcattcctcaggcccctacgactccatctcacctctcagactcccatgactctttcttacatctcattatgttaaatttaactggctctctgtttcccactatatgctgctctttccatcctaggaagcagacgtcagtcagttctcaacatctagcatttgccacaaacattggtttcataataggtcaacaagtatgttgacctatataaccttgctaagaattttagggaaaggatgagattcctaatttgtagtctcccttcatccataattggtgcccgagagaataggaccctaaaatgattgggattgcagggcattagtgagattgggcatgttttataagaacccatggaacagttatctcctcttctcccttctgcctgcaaatggtgagaggggttgcataaagcaacaaaaatgctcacagaaaaagaaaattatggatattgtacacactttcttttcccatcaaggatccttattcagatatggaacatgagagtcctatgctagatccttttctcttcttcatttttgaaggcttggtgctgtcctcctatggctggcaggaatcaagattgaggttaggagtgatggagtgtcctttatgccaagatattcaatggccaatatgacagccactagccacacctgcctatttacatttagttttaaattgttaaatgtgaaaatcagttcctcctttgaagtagccatatttcaagtgctcaaaagccacacgtggctcttgcctgccaccatgtaagacatgcctttgctcctcctttgacttctgccatgatggtgaggcctccccagccacgtgaaactaaaagaatttttctgggtaatggacataggcataggacgtctggcaacaaaatctgctttgaagaggactccagggaatagagatgaggtctcaggctggtcttgaattcccggccccaagaaatccttccaccttggcatcccaaagcactgggattacagtcatgagccaccgcacccagcctgagcattactgtttgatagatattcccaaatcactctccacaaaaggttacaacagtgaacacttccatcagctgaatatctgtgaaagcaattgttgagagattttgaagtaagttcaaaaccaaactgtagaaaaaaatcattgacaaaaaaggaaagcaaaaaaaaagaaagaaaataactgaggaattattactgaagacaacttttgtctaaaaaaaaaaaagaacatttgtttgcaatgtaaaatcgggtttcagctggaaaattaagcctgttaaaaacatcaacaacaagagcaaaaatcctgaatattttttcagcaattctgattaaagtatgtatgttaaaaaaagaaaaagccatgtgaggccagtggctttcacactggacaccacagacagggaacatttccatcctgggtgagaactctattggacagcattgactttagaacctctgctgtagtccagttgaccagagggtcctgccttgggctatctgccattggtttcatttctatttttatttttattttttaaattgagacagagtctggctctgttgcccaggctggagtgcagtggcatgatcttggctcactgcaacctctgcctcccgggttcaagctattctcctgcctcagcgtccccaatagctgggattacaggcatgcaccagcacacccggttaattttttatatttttggtagagacagggtttcatcatgttggccaggctggtctccaactcctgacctcaagtgaaccacccgccctggcctcccaaagtcctgggattacacctgtgagccaccgcacccagtctgggataggttttattaaacaaagtagttctttaagctctaccatccatggtccccggcgtgcagcactgcttttaaaatatcccatgttaaatgggtgcatggaccaagcaagactgaggaattcctgtcctcattagcagtgcttttcagcctgtgaaatatcaccctgaaataaaatctatacctgagttaacagtactgtatcaacatcagtttcctggtattagcaatgactgtttgtattgggtcattctggtttttttgttttttgtttttttgatggagttttgctcttgttgcccaggctagagtgcaatggcgtgatcttggctcactgcaacctctgcctcccgagttcaagcaattatcctgcctcaagcctcctgagtagctgggattacaggcatgcgccaccaagcccggctaattctgtatttttagtagagatgggggttcctccatgttggtcaggctggtttcaaactcccgacatcaggtggtccgcccctctcagcctcccaaagtgctgggattacaggagtgagacaccgcgcctggcctgtattgggtcattcttgcattgctatagaggactgtctgagactaggcaatttacaaagaaaagaggtttaattggctcatggtgctgcaggatgtacatcatgggaccagcttctgcttggtttctgggaggcctcagggacgtttaactcatggtggaaggtgaagtggaacaggcctgtcatatgatgtcagcaggagcaagacagtgaagggggaggtgccacacacttttaaagaaccagatcttgcatgaactcagagtaagaagccacttatcaccaaaggaatggtgctaaaccatttatgagggatatgcccccttgatccattcacctccctccaggccccacctccaacactccatcacatttcagcatgagatttggaagggacaaacatc[132 bp omitted]catggtgaaaccccgtatctactaaaaatacaaaaattagccaggtgtggtagtgggcacctgtaattccagctacttgggaggctgaggcaaaagaatcgcttgaaccccagaagcagaggttgtagtgagccaagatcgtgccactgcactccagcctgggcaacagagcaagacttcgtctcaaaaaaaaaagaaaaaaagtattatcgtgaggggaaacttggtgaaggctacatgggaactctgcccttctctcccaactactttatcattaatattgttattattttttttgagacaaagcctcactctgtctcccaggctggagtgcagttgcacgatctcggctcactgcaacctccgcctcccaggtttgagcaattctcctgcctcagcctcctgagtagctgggattacaggtgtgggccactatgcccagctgatttttgtatttttagtagagatggggtttcaccatgtaggccaggctggtctcaaacttttgacctcaggcgatccacctgccctcgcctcccagtgtgctgagattacaggtgtgagccactgggctcagaccttttttccctacttcttatgagatacaaactcttttgaaataaaaacttaagataacaaagaagaaaagtaacatatatactaatttttatgcaaataacctgcatgtctttgcttcttatgaatgtacataaaccaatggagcaaaattccaaatctttaattttttcccaacaaatagatgtcccttacgtatcatttgtcacacaggcctcagcctgaaaaaaaattccagtttttgtgtattgcagttcccgtatgctattgtcaaccaacagtttccgtgatccttgtagtctaatgagtttggatgcatctatgttcctactggatccactgtccctgggaaaacacaaatggaattggaatgtgagcatgtcagaggagctcgatggtgggacaatctcctcactgtgatgtagcgaaagtagcccgatccttagagatatccatccttagacatgcccatccatagagatgccatccttagagatatccatccttagacatgcccatccatagagatgccatccttagagacatccatccttagacatgcccatccatagagatgccatccttagagatactatccttagagatgccatcctcagagatgtcttagagatgcccattcttagagacaccttcttcgatgcccatgctagaataaaataccattcctccacatttttattgaactaactgcattgctgttaccacttcgtagacaatgatcttatctcaggaggcatgcctcctttgattctcaatccctgatgttcatcacggtctgtcacacttggtgatgctcgctactggcttctgaaaggatactgtgtttttgtaaactataggagcataacaagggccccactcttctatccttcgttggtcctaaacaggagggaatgttaaccagatgaagttgtttgcacaacactgaatggactgagcttatttgaaggtaggatctctttatttagtgtgagcgtgtcagggatgatggacactagagtgatctgcattcactgcctttcacagacatcactcagcagtgacagacctgtcaaagttgttgcttaacctctctgagtatcagctttctaatttgtaaaataaggatacagtactctcgtcacaaatccttgtggtgattaatcatagaaggctaaaattacttagcgcaagagttggaaacactgggttcccaaagcaaacaattcgtcctagtccgtggtcttttatgcatgccagatcatctgtctcagtcatttcagacttttttttttttttttttttgagacagagtttcactgttgtcgcccaggctggagtgcaatggagcgatcttggctcactgcaacctccacctcccaggttcaagcgattctcgtgcctcagcctcccgagtagctgggattacaagtgcccgccaccatgcccagctaatttttatatttgtagtagagatggggtttcaccatgttggccagactggtctcgaactcctgacatcaggtgatctgcccgcctccgcctcccaaagtgctcggattacaggcgtgagtcaccatgcctggccaaggttgctatttttaaaacctatggactgagaagcttgtgaacaatataaatgtatttgtcacagctctggatgctggaaagcccaggatcaaggtgctggtagatcagtgtctgctcctgattcatagagggcagacttcttgttctgtccaagcatggggaaagagaaaggagctctccagggttccttcatgagggaactaattccattcatgagggcgctacctttatcacctgacacctctcaaaggccccatctcctaacaacatcacattggaagttaggatttcaacatattaatattggaagaacacaaacattcattctgcagcagtgtctgaattgcatacatgaaatatttggtcagattaatttgttttgagttccaagacaatgtaaaacagtgcattcattttctacaaatgagacataaacctggtgctgatgaggagccactgaaacacacagagggagggcttagtgagtcaggctgcttggttctgctctgatctgggcgccatgctatgggattgtcaagagcgtggtcaaggccataggcccatgcatcaaggaaagagctggaagaacagccctagactcgcttttgctcaggtatgaagttgccatggtcagaatcaaggaaggagagagaaggtctaaaaaggtcagaaacagggaa[212 bp omitted]gaggcagaagaatcgcttgaacccaggaggcagaggttgtagtgagctgagatggtaccagcgcactctggcctgggcaacaaaacaagactctgtgtcaaaaaaaaaaaaaaagtacacctgggtgcccatgggagttttcccttcattcatgcagagatgggtgaatgaataaaatgtgagcagaacctttcttccagaaaacatccatggtcctctgtatctcatgaactataacgaaacacagaagaatcagccatcaggagccctcacagagcgcaaagtcactcaccgtctcggcagctcttcctcactgctgctactcttttctggacactcctttttttccatttgtcaaatgtggtatttatgtctttactgtatcttttttaccctgaaaaaataaaaggaggttgtatttaggtacttgggaagaaccatcagataaatcttagcttctgtgtctctcaaaggttgacaaaagcgcttattgctcattcacaagagatgcatcagtggaattgctcctagtagtggtaggtacttgggacagaggccgaaacaggagagttgtaaaacagaaactagaaacttcctttttttttagatggagtctagctctgtcacccaggctggagtgcaatggcgagatcttgactcacagcaacctccacctcccgggttcaagcgattctcctgcctcagcctcctgagtagctgggattacaggcatgcgccaccatacccggctaatttttctatttttagtatagacagggtttctccatgttggtcaggctggtctcaaactcccaacctcaggtgatcggcccgtctcggcctcccaaagtgccggattgcaggcgtgagccaccgtgccctgccggatttttcaaattcttttatttttgatgtggccctgggtctgcaagttaagttatgcagaacaggaacttctaaagattccaacctgacagaggcaaaagtgtgattattttccttgccttccattcttctctcgtacaactctaatcgtttttcttgcctaaattgtcaccttgatttctttaaaatacttgggtttaggaaccgttgtctaatccattaccttcaccggctctgctatgacattttttaaagattagatttttaaaataatggctttatggatatatagttcacaaaccacacaattcacccacataagtctacaattcaatgttgtatatatagtaatgaagttgtacaaccaccaccacaatcagttttaggacagcgtcatcacctcaaaaagaaactcattaagcggcactccccattccccacaggcacgcacacccagccacaggcacccacgcatccaccttctgtctccataggttgactcattctggacatttgatttaataggagttgttatggaccgaatgtatgtgtccaccctcaagttcatgtgttgaaatcctaactccaaatgtgatgataggaggagatggggccttcgggaggtgatgaggtcatgagggtggaatcctcatgaatggtctcaacgcccttagcaaagagaccccagagacctcgctcccgctttctaccgtgggagggcgcagcaagaagtcagccgtctatgaacaaggaagcaggtcctctccaggcactgaatgtaccagtgccttgatcgtggacttcccagcctccagaactgtgagaaataaattctgttgtttaagccacatagtctatgatacttttgttaaagaagcccaaagtgactaagacaggcatcaaacaatatattgtcctttgtgatggattctttcacttcccgtatgttttcaaggtccatccatattataccgcataacagcacctcctttgctttcatggctgaataatattccaccgtatggagacatcacatattctcttatccattcagcagacgatagacatttgggtgagttccactttggggctgttatgaaaaatgatactgtgaatattcaggtacgaatttccatgtggacagattatttccttctcttgggtacatacttaggagtggagttgctgggtcatatggtaactctatgtttacccttcaaggaactgccagactgttttccaaagcgccaatttccgtgctcgcttcggcagcacatataccaaagcgccaatctccattcccaccagcagtgtaggagggggccagcttctccatatcctcacctataattgttattatgggccttttgaaaatggccattctagtacatgtaaagtgataagttattgtgatttttgaagattaacttttatataataataaaaatacatattattaatagcatttcagagactctggataacagaaaagataattagtgaaatacaaatcattaatttgtaattagtcaccaggctgctccacctcccaggttcaagcgattttcctgcctc[135 bp omitted]agcctctcaaagtgctgggattacagacgtgagccattgcccctggcccagagaaataatctaaagatttgaattccaaaaccctatacaaatgttttattttaccaccactgaatttatctgcaataactgaatgtctatttatatgcataataatcactcacaggttccaactaaacaaatatttctatccaattttcaataaaaatattaaaatctgcatatttaatttattcatgtttaattattatgcttctcacagcctgcgaaaaatttaatttagctatcctctgaactacaagcttttcctttgttataacgaacacttttcttttacttaagtatcgttattccagagttaatatagtatgcattcaaattacttcttatttagtattattttacctagtaccattatatatttaattttttctcatgaagccaggcacagtggtttgtgcctgtagtcccagctactcaggaggctgaagtgacaggatcccttgatcccaggagattaaggtcgcagtgagctatgatggcgccgctgcattccagtctgggcgacaaagcaatacctcatttcaagaaacgaaatggaattttttccttataagaatcttaaagaaggtgtacattatcttggctaactttctataggattaagtagaagttattgagacttggtctacagtcttctttttttcatgagtcaaaaagcatctctcactttagttacacctgtattaggagagttatgatcaattacagcagttgtagtttctgagaacttggataaatacaaacctgaattacacagaatttatgtaaatccagatattcaaaaatgagaaataatgtaatatatgaccaaagtaatatcaagacaacatacaattaaatcactcaacaattactgggaatatgtatcaaggcaagaattgtaaaattctacctggtacttctgaaatgaacaaggcaatgagaaataacagtttatcttgtctattactgagtatcaatgaaagcaataaggtgaacggaaaagtccatgaaaactccattttcagaataatgaggagacagatttaattcacagatccaaatgtttctcaccggctgacaaaactgtgttaagtcagggtgaagcatggcggaggaacagggaggaagtgcagagtgagaaaacataaagaagtcaggaagtgccagaggagtaatttcctgtgagtaaagcctcatactcggtgatttatctatagagtttgaatacaagagctgtgaggtctgggcaggtagagtggaggctgagcaggagataaatgtggtagaggcggtgtggatccttgaaaacagagaaatgccctaatgtgacagagtacagaaatactacaaaaacacacttgtagaaagaacattctgcatataatcaggcatggaacggtcccatgcattccataataattaagaaaaagatattaccagagcattgcttaaaggcactacaagaaaataggtgagaagaccaggaagttgttgttttttgttttgttttgttttagataaagaacaatcaaaggaaaatgatggacccaagttaacaatcactcttggggggaaaaaaactccacccacaattcctaagtaaaaaggattacacacattctcggcataatatgtctctctcaggccaaaggataaccttgtgcttcatgtggacactatgaaatcattccagctgaagtcaggaaaataccaagaccttccctatttaagttaaaatatcggaagcttattccaaaatattggacaaattccaaatacagtgattgaaaggaaggagattaaactataactcactacacgttattttcctctatagagaaacataacgaatcacctgaaataagctacaaaagtaagataaaccagtaagttagagaaagaatctttttttttctttgagacggggcctccctctgtcgctcaggctgtagagaagtggcacaatctcggctcactgcaacctctgcatcctgggttcaagtgattctcctgccttagcctcccaagtagctgcgattacagacatgcaccaccatgcctggctaattttttttgtatttttagtagagatggggtttcaccatgttggataggctggtctcaaacttctgacctcaggtgatccgcccacctcagcctcccaaagtgctgggattacaggtgtcagccaccgcaccagccagaagaatcttaatatacaaaagtgaatagcttcttaatataacagactatcccaattccatgaaagaagaaaatacactcattaaaatagcaactatggtacctagaactaaactatacaaaaaaactacatgacccatataatgcttttattttgaaataattttaaacattgaaaaatagcaaagattcacataaatcctcaaccagcttatctgaatgttagctatatataattgtattatatataaaataattgttatatataaaataactaatttattgtattgtatattgtattatatatacatttattgtattatatataaataattgcatatctacatttaatatattatatataatatacaattgtatatgcaattgtaatatgataattacatatataatagtatatataatacaattatccaaccaggaaattgatgttagcatatcataccattacttaatgtgcagaccttatttgaattttatcaacatttgtctgaatgtcctctttgttctccaagatctaatcgaggatctcacattgcacttacttgttatccctccttagattcctccagtctgtgaccgtttcttattcttcccttgtcttttgtgattgtgacatttttgcggaacatggtcaactattttacagaatgtttatcaatttggatttctttgatgttttctcacgattaggctgaggtcatgcatgtttgtcttctgtgttcagtcaacatgccccgtcctttttggaatatttcttcatgttctggagtcacaatttgttccaatgttatcctatatactcctgccccagccctggaagtaaccacttctccacggatccttggctcccttgtattcaaaaacagtatttagaaaccaagatctggaaactatgtgtgtttacagctactaagatatctttgtcctaatctctctcagtggaaagacctggggaatccatgcatgtataccgaactgtgcctacacatgcctgtatttacttctcgatagatagactgacaaacagatagacaaatagagcagagcaaagagctattctgatacatgaaatagaaaatcaataataaaaaaaaacattgctctagaaataggtagacaaaggatatgaacatgaaattcacagaaatggaaaaataaatggttcccaagcacgtgctgaatgaaaaaacaccatgctgaatgaagattaaagctactcttgaatattttttctccatgaatttggaaatcatgcgaaagtctgaaaactcatctactgacaaggctgtgggaaatctgacattctgatattgctgatgggagtgtcacctgctattcattatatggatggcaactttatggacatctttgaacgcataaatgacatcccatttggaatggtaaatcaattttgaggaattgatatactcctatacaaatatacttacctatgtatgaactcatgctcacatgtttactcactgtggcactcttcataaatacaattgaggccaggcgctatggctcaagcctgtaatcaccacaccttgagaggccaagccgggtagatcacttgaggtcaggagttcgagaccagcctggccaacaaggtgaaaccccgtctctacgaaaaatacaaaaattacctgggtgtggtggcatgggcctgtaatttcagctactcgggagggtgaggcaggagaatcgcttgaaccaagaagtcataggttgcagtgagccaaaatggtgccactgcactccagcctgggtgacacagcaagactccatctcaaaaattaaaagtaaaataaaataaactaaaatttgaaacaactgaaatgtttttcaataggggaatgaataaagacatcatgatacatccgatgatgaaataatatgcaattttaaaagaatgtcaaagttcactaaaaactgatactgaattatcactaagatctattgttaatgaagaaaggcatagtaaacaacatgtaaactttctactcttcaagtaaagagtaaaaatttgtatatgcataaagaaactctggatatatatatatacagtaacaccacagtacatattcaactgtgtttggggagcagactatgtgaatttattaccctttataaagtaaacaaatggtttaaaaacctccacctaaaattttcacacgcaaaattttatatatatatactatactttcatgacactatgttattgtatatatatatatatatatatacacacacacacaatgcttccatttgttttgatgtcacacaagcaaaattaaattacactaaattttaaattttaacattaaaatacacatgatttttaccatttgtgatacacattgtatcatatgtattctcaattgaaatttcaattaaaattcagttaccactcatcaaattttactatgactatttcaactgaaaacattttcatattgcatttaaaaagttttgacggtttacttttattttagaaatcaaattatttcatgaaaaccaaatactcttcaccttaaattgtcttttttactcccatgaaaatctgtattcatcttcacaagaaaaaaatgcaaaattacattctttaaagttcaaatactaaaattcttgtatagtattttatgtgacattggaaattttaaaaaacatgtaataaaaatcccagtcacgcatgaagttatagccttgcctgcacgtattgcctgtagccccagccacccggaggccgaggtgggaggatcacttgggtccaaatggctgagaccagtctgtgccacacagcgaagccctgtcatttaaaaaaaattcctaaacttccaaaaattggaataaaattcattattccttgacatattgaagaaacaaacaacagagaaatgaattaatgatataaataaggaatcaaaaggataaaacacaaatgtcctgaaaagatgttaaaattcactagtaatcaggggaatgtgcatgacaaccactatcagttatcattctcacccacaatactgatggaaataagaaaagctgacaaaatcaagtgtgaatatgaatgtgtagcaatggaaactcgtaaaccagtagtggagatgactgaaaacacagccgctttggagaataaactggctgtatctagacttcaagacacacctacccttgaaattatgtgtggacaagaaaatgcatataaaaagtccattgtattatggtttgctatcagaaaacagggtaacaaactgaatgtccatcatcaaagaatggatacattgattataatatcatcattgcattaatactgtagcgcagttaacataaattattaaaaccacatgtaaacatggataaatatttaaaatgtactattgggccgggcacggtggctcacgcctgtaatcccaacactttgggaggccgaggcgggcggatcacctgagatcaggagttcgaagccagactggcaacatagtgaaactccgtctctactaaaaatacaaaaattagtcgtgcgtggtggcgggcgcctgtcaccccagctactcgggaggctgaggcagaagaatcgcttgaacccgagaggtggaggttgcagtgagccgagatcacaccactggactccagcctggatgacagaacgagactccgtctcaaaaaaaaaaaaaagtaatattgattaaaaatcaaattgcatgagactgcacagcacgataccaagcaaatacaagttttaaatattacagaaaataatatttaaaatacaaaccaaatacataaatcatgcagggggattaagacgtttctggatagtggcaacagccgagagtggctggatgaatttcagagaaatttcatatattgcttcaattttatttaaaatatattattacctatgttttagatattttattgtaaataatgggcaaggatattataaactctgcagaagtaagtgtagtcgtgttttttcctactcacattgaagatggcccagatgcttgcactaaccgcgtttaccgcccacagccatcatggcgaccggaagtcctgagagcttgtttccctcgaatctcagacagccctccttctctatgaacattatttcaaaagaagttgagaactagagaaaccgaagcttaaggggattctcccatttggcctgtcctcccctaaagtcaccacctgctgcgtttctgcagcgcttaccatgtgagtttcaggagccccagggtgcaggaaggaggagcggaggcttgttgcttggacactgccaggctgctctgtgttctgttcctcttggtcacttgagaagaaagggagaagttcctatgaggctgtcggaaagggaaatggggccctccgcttgttgaaaacaaaacaaaaccctcaggaagctttgcatcctgttagtcatagcttaaatttatgacttcaatgacttggctgggacagtcttaatctctccatactcaagttgttttaatttctgtaataataatttttataccaatgtttgtgttgttaatactaataattttacattgtaactgtaatcctttaattattacaagtgttaacctaaataacaaacatatgaaagcttcctaaaggaaacagtgtttatttgggaatagagcattgcaattgggaatagatatgccatattaaactatgtatatattcaggaagataaaggaagacagaaatggggaggattgcatattgttttgacaggattttccttggccacaggatcaggcacaaaggtgacattagtctgaggttggacaggcagttgctgggcagcattccttgcagaaatattttttgtttaaggttgcaatgacctttatgcaaggttgtgggttttgtagagtctttttcattttcaagcatacaaggataagaccccccctcttcatggctttcctggctttatttgtcagggtcatcttaacattagtggctccattttgttctgacaactttcagatttctccttgtgatcaagaactttctctaaaagcattattgatcaatcattctgtaattaagatttgatgtcccctgatgccagcatggacctctcccagtttgctggtctcatcccatgttgtggggagtgactggtgactaggaatcgatgtcaaaagcacatttgagcaacaaaagagatttgaaggatgtggctctcaggctaagtctccctggagtccattagtaagttcaattttgtctgttctacagtcttttgctatccctttaaagtgctgattcagtattattttgttaggagctgcacctctgaaaaaatttaacaagtaacacatacaaagtttaaaaaggagaaatacaaagtaaggggaaatacaaattaagagcaatatgagattttcagtttgcatatggttttgagccataaacctaggtttaaagacaactaattgaagaactcaaacagttattcgagacagcagggagttaggtgagacctggggtaaccacatggcctgctttcttattttgtgtataggagcctcaacttttctcagaggaatttattcaggtatagcatgtcgtattagcaacatcacagacaatttcttgcttaaccaatggatactaaagaattttgtaggttgggttctgttaagttataagcagaaggaattgatcataaaatttaagttacaccattattctgctaagtagaaaaggtcgaattaagtgagatgaaagtctcattatgatatagagtcttgtttcagcatcttgcagaaagttatacagtgtgaaaacaccaactttttctcctggtttgtagtgtgaacgtctctggttatgatattgggcagtttggtaaactattgtgtgatccgcatatcagccttgaggtttgttccctctttcattttcctctggatcaccaacatgctaatctacgttcacatcactgaaaccgtagaggccaataccaatttcaccatttctggtcctggatatttgcaagactgttgtcaaactaggccatacatacaataatttaatatacatttggggcttggattatatttctgttaaattgcactgctctatgggacttattttattcattccacaaatatattttgcacatgttccttattcttggtactatttaatggatttggcatacatccgtgatctaaacagataaaactcccccaaggatcatttataaatgtcatggtgattcgccatgtcctgtttgtgttcctcatggtctggaccagcatcaacatggccagtctcctctgcagacaccggcggagagcccagcgtctgcacagccctagcctctcttcccagccatctcctgaacacagagccacccataccatcctcctgctgcttggttgctttgtgtgcttttattgctcaaacaacttcatcactctttatttcttttataaatctgagaaaaaatcaagactagagatgatcactggaattatttcatcatgctacccaaccatctgcccttttgtgctaataaaaaataataaaattatttcctaatttacctcttcctctctaagacaagaatgatcagctctcagggagcattcaatggctgatctcaaaccccatactttcttctgcagctgggaagtctccatgatgacttttgtggagaaaaagtcatgcagttattgagcaattgaattagggctagtttgaattgaggtgtatcataaatttaaaaagcattcaggttttgaagtcaatataaataacagtatataaatattatcttaataactttcacattgctgacaagtttaaattatgacattttgggtaaaacgtatgtatatgttttgttatgtttacatatatatgcatatttaaataaaatacatatacacaaatatgtaagtaaaacatatgtaagaatatatataatatatataattttttttttttgagacagagtcttgctctgtcacccaggctggagtatgcagtggtgtgatctcagctcactgcggcccccacctcctggattcaagcaatcctcccacttcagccttccgagtagctaggattataggtgtgcaccaccatgcctggctaatttttttgtattttttagtagagacagagtttccccacgttggccaggctggtctagaactcctgacctcaagtgaaccgcctgtgtcagcctccaaaagtgctaggattgtaggtgtgagccaccgcactggccttatcagtatatacacacacacacacacacacacacacacatatgtgtatacatatacaactacataggtatttttaaactaactgtatctgcttgtttttgcttttttaaatgcagttgctagaaaatttaatatacatttggggcttggattatatttctgttaaactgcactgctctatggcacttcttgtattcattccacaaatacattttgcacatgttccttattcttggtactatttaatgggttggacatacatccatgatctaaacagataaaacataatagcacaagagattatacagaatgtttgtggtacaggaaaacgtatatgtacacatgataggagctaaaaagaataggactggttaagagaatgtggtgtgtgagagtacaggtgcagggagctgcagtgactgggattacaggtatgcatcaccatgcctggctaatttttgtatttttgtagagacggggtttcaccaatttggccaggctggtctcgaactcctggcctcacgtgatccacctgcctcagcctcccaaagtgctgtaattacaggtgtgagccaccgtgcctggccaacatttatcattttaaatactcatctgcaaaaatgtttccaagtggggccacttccccacccctcatatgacagtggcagtgatataccatatacatggttattaaaaagaatctggagcaacaatatgaatgtcagacaaattaggcttcaagagcatttccctccatcttacaggggataaacccaaagaagttatattaagattccaataaaagaatgcaagatgactatctgtgtaaaaatgtaatcaatggggagcaggtgcacctccaataatattagacaaaatatattttacctaaacagcattactaagtataaagtagatcacttcaataagaataacaattttaattttgtgtatacatattcacactttcaatatgtatatagtatacacgggtagaatgataaacagatatagaataatcctccactcttgtgggaaatctgttcaatagtctttcagcaattaacagaataacagagtatcagtaaagatataaaaaattgaccaaagcaattcatattcttgacttaagtgccctagaataacaactcacacagccattgaagaatccccatcatcctatctcaagcatagaggaaacacatagcatacatatgtagccacatagcaaacacagaaatgactatcaacaaagtggaagagtttaatgcacagattaagttatctgaatatatgtacaatgagttataaataataaataattgagccaggtgaagtagtacatgcctgtaatcccacctacttgggaggctgaggtaggagtttgagcccaggagtttgagtctggtctgggcagcattgcaagatcccatcccccaaataataaataaactaactaagtaatcaataattgaatgagaaaagttagctcatatttcaatatgttcaatcttaggatatatacttctaggcaaccacttagtgacaaaaattctgtagaaatccatcattgaaagttcattatgtaaataaatgtgaagactagataagaaccacagaacacaatgacattggaaaaaatgccacagtaattctttgaaaaaagaaatgcaggcctggtgcggtggctcatccctgtaatcccagcactttgggaggccgaagtgggcagatcacaagtcaggggttcgagaccagcctggccaacatagtgaaaccccgtctctactaaaaacacaaaaacaattagctgggtgtggtggtgggcacctgtagtcgcagctactcgggaggctgaggcaggagagtgctttcagagaaacttcttgatcacaaggggaaatctgaaagttgtcagaacaaaatggagtcacttatgttaagataaccctgacaaatagagccaggaaggccatgaagagagggctcttatccttgcatgcctgaagatgaaaaagactctacaaaacccacaaccttacataaaggtcttcacaaccttaaaaaaatatatatttctgcaaggaatgctgcccagcaactgctggtccaacctaggactaatgtcacccttgttactgatctttgtagccaaggaaaattctgttaaaacaatatgcaatcctccccatttctgtcttcctttatctccctgaatatacacatagtttaatacggcatgtctattcccaattgcaatgctctattcccaaataaacattgtttccggctgggcgcagtggctcacgcctgtaatcccaacactttgggaggccaaggcgggctgatctcgaggtcaagagacggagaccatcctggccaacatggtgaaaccccgtctctactaaaaaataaaaaattagctggatgtggtggtgcacgcctgtagtcccagctacttgggagactgaggcacgagaatcgcttgaacctgggaggcagaggttgcagtgagccaagatcatgccactgtactccagcctagccacagagcgagactccatctcaaaaagaaaaaaaaattgtttcccttaggaagctttcatatgtttgttagttaggttaacacttctaataattaaagttatacagttacagtgtaaaattattagtattaacaacataaacattggtataaaaattattattacagaaattaaaacaaattgagtgtgagagagattattaagactgtccaagccaagtcactgaagtcataaatttaagttatgacaggatgccgagcttccagagggttttgtttttaacaagggaggggccctatttccccttctgacacgctcatatgaacttctcactttgtcgtactccttccttgctgactaagaggaacagaacacagagcagcctggcggtgtcctaccaacaagcctccgtttctccttcctgtacactagggctcctgaaactcacctggtaagcgctccagaaaagcagcaggtggtgactttagggtaggacgggccaaatgggagaatccccttaggtcggtttctctggttctcaacttcttttgaaataacgctcgcagaggaggtgggctttctgagaactgagggaagtaagctctcaggacttccggtcgccatgatggctgtgggcagtcaatggggtcagtgcaagcatctgggccatctttaatgtgggcaggaaaaaaacacgattacacttacttctgcagagtttataatatccttgttcattatttaaaataaaatatctaagacataggtaatagtatattttaaataaaattgaagcaatatatgaaatttctctggaattcatccagccactctcagctgttaccactatccagaaacgtcttaatccgcctgcatgatttatgtatttggtttgtattttaaatatcattttctgtaatatttaaaagttgtatttgcttggtatcctgctatgcattctcatgcaatttgatttttaatcaatattacttttttttttttttgagatgaagtctccgtctgtcacccaggctggagtgtaatggagcaatctcggctcactgcaacctctgcctcccaggttcaagcgattctcttgcctcagcctcccgagtagctggaattataggtgcatgccaccacgctcggctaattttttgtatttttagtaaagacgga[145 bp omitted]tggttacttcgagggctggggcaggaatatataagataacattggaacaaattctgacgccagaacatgaagaaatatttgaaaaaggatggggcatattgactgaacacagaagacaaacatgcatgacctcagcctaatcgtgagaaaacatcaaagaaatccaaattgataaacattctgtaaaataattggccatgctcagcaaaagtgtcacaatcacaaaagacaagggaagaataagaaacggtcacagcctggaggaatctaaggacataacaactgagtgcaatgtgagatcctcgattcgatcttggagaagaaagaggacgttaagagaaatattgacaaaattcaaataaggtctgcacattaggtaatggtaagatacgttgacatcaatttcctggttggatacttgtattacatatactattatgtatataattattatattacaattacatatacagttgtatattatatataatacaataaatgtatatatatgattataatacaataaatgtatatatacagttttatatataacaactattatacatataatacaattatatatatagctaacatcaggataggctggttgaggatttatatgaatctttgctaattttgcatgtttaaaattatttcaacataaaaaaattatatgggtcatgtagttttttgtgcagtttaattctaggcaccatagtttctgttttaatgggtgtattttcttctttcaaggaattgggatagtctgttgtattaaaaacctattcatttttgtacattaagattcttctggccaggcgcaatggctcaagcctataatcccagcacttgggaacctgaggcaggcagatcacctgaggtcaggagttcaagaccagcatgtccaacatggtgaaaccccatctctactaaaaatacaaaaaaaattagccaggcatggtggcacatgcctgtaatcccagctacttgggaggctgaggaggagactcactagaactcaggaagcagaggttgcagtgagccaagactgcgccactgcactctggcctaagcaacagagggagactccatctcaaaaaaaaaaaaagattatttctctaacttactggtttatcttttatagcttatttcaggtgatttgttgtgtttgtctatagagtaaaataacatgtctaatgagttataatttaatgtccttccattcaatcactgtatttcaaatttattccaatattttggaataagcttccaatattttaacttaaatagggaaggtcatacttggtattttcctgacctcagctggaatgccttcatagtgttcacatgaacacatttggcctgagagagacttattatgccgagaatgtgtgtaaccctttttacttaggaattgtgggtggagtttttccccccgcccaagaatgattgttaatttccgtccatcattttcctttgattgttcttcatctcgaaaacaaataataaaataataaaataaataaataaaacttactggtcttctcacctattttcttgcagtgcctttaagcaatgctctgccaatatctttttcttaattattatggaatgcatgggaccgttccatgcctgattatatgcagaatgttctttctacaagtgagtttttgtagtatttctgtactctgccatactagggcatttctctgttttcaaggatctcccaaccacaccgcctctaccacatttatctcctgctcagcctccactccaactgcccagacctcacagctcttgtattcaaactctatcgataaatcaccgagtatgaggctttactcacaggaaattactcttctggcacttcctgacttctttatgttttctcactctgcacttcctccctgttcctccgctatgcttcaccctgacttaacacagttttgtcagccagtgagaaacatgtggatctgtgaattctatctgtctcctcgttattctgaaaatggagtttgcatggacttttccgttcaccttattgctttcattgatactcagtaatagacaagataaactgttatttctcattgccttgttcatttcagaagtaccaggtagaattttacaattcttgccttgatacatattcccagtaattgttgagtgatttaattgtatgttgtcttgatattactttggtcatatattacattatttctcatttttgaatatctggatttacataaattctgtgtaattcaggtttgtatttatccaagttctcagaaactacaactgctgtaattgatcataactctcctaatacaggtgtaactaaagtgagagatgctttttgactcatgaaaaaaagaagactgtagaccaagtctcaataacttccacttaatcctatagaaagttagccaagataatgtacaccttctttaagattcttataaggaaaagattccattttgtttcttgaaatgaggtattgctttgtcgcccagactggaatgcagcggtgccatcatagctcactgcgaccttaaactcctgggctcaagggatcctctcacttcagcctcccgagtagctgggactacaggcacaaaccactgtgcctggcttcatgagaaaaaattaaatatataatggtactaggtaaaataatactaaataagaagtaatttgaatgcatactatattaactctggaataacgatacttaagtaaaagaaaagtgttcgttacaacaaagggaagcttgtagttcagaggatagctaaattaaatttgttgcaggctgtgagagacataacaaacataaacacatgaaatatgtagatttttatatttttattgaaaattggatagaaatatttggtttgttcagttggaacatgtgagttgattattatgcatataaataaacagacattcagtgtaggggccagccctacagggtctgtgggtctttctcccgttgtgcggagacgagagatcgtagaaataaagacacaagacagagaaatagaagaaaagacaactgggcccgggggaccactaccaccaagatgcggagaccagcagtggccccgaatgcctggctgtgctgatatttattggatacaaggcaaaaggggcagggtaaggagtgtgagtcatctctaatgattgataaggtcacatgagtcacgtttccaccggacagggggcccctccctgtttggcagccctggtggagagagagaggagacagcttatgccattatttctgcatttcagagacttttagtacttttactaattctgctactgctatctagagggcggagccaggtgtacagagtggaacatgaaagtgaaacaggagcgtgaccgctgaagcacagcatcacagggagccggttaggcctccggataactgcgggcgggcctgactgatgtcaggccttccacaagagacggtggagcagagtcttctctaactcccccggggaaagagagactccctttcctggcccactaagtaacgggtgccttttctaggcactgacgctaccgctagaccaaggtccgctaagtaacaggtgccttcccagacgccggcattaccgctagaccagggagccctctagtggccatgtctgggtgtgacagaaggctcgcactctcgtcttctagtcacttctcaccgtgccccttcagctcctatctctgtatggcctggtttttcctaggttatgattgtagagcgaggattattataacattggaataaagggtaattgctacaaactaatgattaatgatattcatatataatcatatctatgatctagatctagtataactattcttattttctatattttctttattatactggaacagctcgtgccctcggtctctcgcctcggcacctgggtggctttccgccccacaactcaggtgttgcagataaattcattggtggtaaaataaaacgtttgtatagggttttggaattcaaatctttaaaatcacttctctgaatttccattagatgattattgctaccaataaaattttagtaggtaaacacaaccaccttctaagaacttagaactctcagactgggcacgatggctcacgtctgtaatcccagaactttgggaggccaaggcaggcagatcacctgaggtcgggagttcaagaccagcctgagcaacatggagaaaccctgtctctactaaaaatacaaaattagccaggtgtggtggcgcatgcctgtaatcccagctactcaggaggctgagacgggagaattgcttgaacctgagatcgcgccattgcactccagcttggcaacaagagagaaactccgtctaaaaaaaacaaaaaagaacttagaactctccaatattaaatggccagttccctcagaataaaaacaaaccaaaatattgcaaccaaagtgaactttgaataattaattcaattgttacactttcttcttaagttgtgaagaacttcaaaatgacgtgactatataacaatagtgagatgcaaacaaagaacaaaaactaccacaaaagaaattgtgaatttcattcagcagctttactgttagtcttaatatggtgcttattaggagttggttttgcattgctcagtagcagagatataattacagcttgttttatgtggtaatataatataaaagtataccctctctagccttgtctactgacagaattacgtgcaatgtcacagcaagagcctgatgtatctgcccagaattcttgttttgatctgtaaatctctaatagtaattgtgaagagctcaactcagtatggaaactgatctggtcacgcattttttttcagcatcttaaataaacagcacagagtctgaggccacactatgctggacacactgtaatcgcacaaacaaaattgtagggctttgttccaagatggtgttaagacttgatctatggataagatcaacttgtgggtgattcagaggtgcacccactagttccctgcaaccagaaatggtaaacctacttgtctgtttaaagatgcttgaaacaatattgcagagagaggatggtgagacagtggagtgctgtatgatggtgagtgttaaacacaatttgatttattaaaattaagttgcattccttggatacaaatagttcgttttaaaaaataggcagagtattacactattttttttatttattttttgttctgaagacagagtctcactctgtcacccaggctggagtgcagtggcaagatctcagctcactgcaacctccgcctcctgggttcaagcaattctcctatctcagcctctggagtagctggaattacaggcgtgcaccaccatgcccggctaatttttgtatttttagtagagatggggtttcgccatgctgaccaggcaagtctggaactcccgggctcaggctatccacctgcctcagcctcccaacatgctgagattacaggcctgagccaccgtgcccggtcaccccattttaatatatttaataaaaccaaatagtcaaaaagttaagatggattatttatgggtgtttggattttgagcaatttgtaattcactaattttcttttctgttatccaaagtgtctacaatgctattaataatatctatttttaccactatataaaaattaatcttcaaaaattacaataagatatcactttacacgtactagaatggccatttttaaaaggcccataataacaattataggtgaggatatggagaagctggccccctcctacactgctggtgggaatggaaattggcgctttggaaaacagtctggcagttccttgaagggtaaacatagagttaccatatgacccagcaactccactcctaagtatgcacccaagagaaggaaataatctgtccacatggaaattcgtacctgaatattcacagtatcatttttcataacagccccaaagtggaactcacccaaatgtctatcgtctgctgaatggacagagaatacgtggtgtctccatacggtggaatattattcagccatgaaagcaaaggaggtgctgttatgtggtataaaatggatagaccttgaaaacattatgcaaagtgaaaggatccatcacaaaggacaatatattgtttgatgcctgtcttagtcactttgggcttctttaacaaaagtatcatagaccatgtagcttaaacaacagaatttattgtcatagttctggaggctgggaagtccaagatcaaggcactggtacattcagtgcctggagaggacctgcttccttgttcatagacggctgacttcttgctgcattctcccacagtagaaagcgggagcgaggtctctggggtctcttttctaagggcgttgagaccattcatgaggattccaccctcatgacctcatcacctcccgaaggccccatctcctcctatcatcatatttggagttaggatttcaacacgtgaacctgagggtggacacatacattcagtccataacaactcctattaaatcaaacgtcagaatgagtaaacctatggagacagaaggtggatgcgtgggtgcctgtggctgggtgtgcgtgcctgtggggaacggggagtgccacttaatgagtttctttttgaggtgatgacgctgtcctaaaactgagtgtggtggtggttgtacaacttcataactatactatatatacaacattgaattgtatagtttaagtgggtgaattgtgtggtttgtgaactatatatccataaagccattattttaaaaatctaatctttaaaaaatgtcatagcagagccggtgaaggtaatggattagacaacggtccctaaacccaagtattttaaagaaatcaaggtgacaatttaggcaagaaaaatgattagagttgtacgagagaagaatggaaggcaaggaaaataatcaccatttcacttccaaaagtccttttcggaagatagccttttaattaattttaacacaaagtgtacaaaatatattagtttactaactctagttttgtcttatattgacaaactctttaatatctagatactagatattataaaattaggacccatttgtccagtacctacacaacatatacagtgtagcaaagttaaatgaaatgcaggctgggcacggtggctcatgcctataatcccaatactttgggaggctgaggctggcggataacctgaggttgggagtacgagaccagcctgaccaatatggagaaaccccgtctctactaaaaatacaaaattagccgggcgtggtggcccatgcctgtaatcccagctacttggaaagctgaggcacgagaattggttgaacccaggtagcggagg[133 bp omitted]tctcctaatgtcatctccagattaattttttaaatcacccagggcagcaatctgcaatgtcctctggatctgtgtaaactcttgtgtggcaaatgactgaaagttcaacttcaatgcagtaaaaatataaagagagtgtcctggctccgttgaatgcaaggacagaaggtaggactgaccctagggaggctgatccatgagctccaaaaacaccacagggaaggaacgtttctccaggtgtccaccttgccttccatggtgttggctccacacaatattcacatgaagcttcacatctcacaagagacaaaagggagaagagcaagggcagcctctgatccctcccaatgaggagaagtctcctcgggatgtcacaatgtctcgcaagcccatttcccagccagcttatgtttccaggaagtcagggaacagattaaattttcaaaatcatgcctagaggagggtcaagatgcctgactggacacagcccagaagcaccactcccaccaagagaaaccaagatattggataaaccaacagacttagagaagatcttcgtaggaaaaacaccaagagttgatacagaggcatgcagacaacagggctgaagagctaggaacctgggaatgtggtgtggggtagctgaacgctagggccagttcccagcactgaaaggctcctaggggaggggttagtgaagggacagagggatgacaggctgtcaccacagaccgctgatgtcccagctatgggagactgcccacctcccatagacatttttttttcttttgagatggagtttcgctcttgttgcccaggctggaatgcaatggcatgatctcagctcactgcaacctctgcctctcaggttctaatgattctcttgcctcagtctcctgagtagctgggattacaggtgcccaccgccacgctcagctaatttttgtatttttagtagagatgggggtttcaccatgttggccaggctggtcttgaactcctgtcctcatgacccactcgcctcaacctccaaaagtgctggggttacaggcatgagccaccgcgcccggcctccgtagacattttgtcagaggcatttgaaccagagcaactccatcttgagtaggaggtggagaaaatgaggctgagacctaccgggctgcattcccaaatgatgaaggcattctaagtcacaggatgagataggaggtcggcacaagatacaggtcataaagaccttgctgataaaacaggttgcagtaaaggagccggccaaaacccaccaaaaccaggatggcgacgagagtgacctctggtggtcctcattgctacactcccaccagctccatcacagtttacagatgccatggcaacgtcaggaagttaccctatgtggaccaaaaagggaaggcatgaataatccaccccttggttaccatatcatgaagaaataaccataaaaacaggcaaccaaggccgggcacagtggctcacgctggtaatcccagcactttgggacgctgaggcgggcagatcacctgaggtcaggagttcgagatcaccctggccagtatggtgaaaccacgtctctactgaaaatacaaaaaaaattagcagggcctggtggtgggcacctgtaatcccagctactcgggaggctgaggcaggagaatggtgtgaacccaggaggcggaggttgcagtttgccgagatcacgccattgcactccaacctaggcaacaggagcgaaactccgtctcaaaaaagaaagaaagaaagaaagaaaaacatgttaaatgacaacacaaggatctaattggcaaaactgaaaccaaagaaaattttacagaaaaaatgacctactttctacaacaatagcaatgtttgaatggggggatggaattaaataagtggcaacttagattaacaaagaattaacacacacacacaaaaacctattatagtggatgatttgtatctctatgcaaagcaataaagtaaaaataagaaccagggaaatgacaacattaacgggatattttatgatgtcctgaatgatgattacttttcattgtaagggagtattcatgtaagacagtaaagcattttttaactcttcatcttttaaacatacatagtgatatttttattttttattttttatttattgatacagagtctcactctgtcacccagagtggagtgcagtggcaagatctcagctcactacaacctccacctcctgagctcaagtgatcctcccgcctcagcctcccaagtagctgaagtagctgggactacgtgcaccacacgcctgactaatttttttttttttttttttagagacagggttttgccattttgcccagggtggtctcgaactcctgagctcaggcaatccacccacttcggcctctcaaagcatgaaccactgtacctggccatcgtagtgatatttttacaggtgaaataatataatgttcccaattttctttaaaaagatccacctagcagtgaaggcataggtgaaacggg[143 bp omitted]tcctggcttccagcgattctcctgcctcagcctcccaagtagctgggattacaggcgtccaccacacccagctaatttttgtatttttagtagagactgggtttcaccatg[137 bp omitted]agggaagcactgctggagatgaagacccagagaaaatagaagggaattggacacctacaaccactagaggtcgcaagaggaatatcctttagtgccctgagcccagacctgaaccaaggtttaacagggttcttctcaagtccttggactccttcggtcataatttgggagcctccaaaaaggagagcctgaaatgagggcttacgtgcaggtagtttatttggggaagaggtcagaaattttcttttttttttttatggagttccgctcttgttgcccaggctggagtgcaatggcacactcggctcaccgcaacctccgcctcccaggttcaagcgattctcctgcctcagcctcccgagtagctggaattacaggcatgcgccaccacgcccggctaattttgtatttttagtagagacggggtatctccattttggtcaggctggtcttgaactcctgacctcaggtgatccgcccacctcagcctcccaaagtgctgagattacaggtgtg[137 bp omitted]cctctccccgtcaggttcaaacaattctcccgcctc[134 bp omitted]cagcttcccaaagtgctgggattacaggtgtgagccaccatgcccagccatacattttacttttgaacactacataccgtggaatacttttcagactttaaaaggaatgaaatactgatacatgcttcaccgtaggtgaacttggaaaacattgtgcaaaattaaatacgtcagacacaaaaaggcaaaggccgagtgattccacttctaggagattcctagaacagtcaaattcctggacacagaaagtagaacagagcttaccagggactgagagaaaaagggaatggggtgtgattatttaacgggtacggagttttaattgggaaagatgacaaagttctggagatgaatcgtgatgatggttacacagcgatgtggctgtacttaatgccactgaagtgtacactttaaaatggttcacatggaggc[275 bp omitted]caaaaaaaaaaaaaaaaatggttcacatggaaatgtttgtgatgtatattttatcaccgtaaaaaaatgtaactggggtaagtatgatcaatatttggcaatttaagctttatggtagaatttcattactagagtgaagaaagacagtccataaaaaataaattatttaggccggggtgcagtggctcatgcctgtaatcccagcacttcgggaggccgaggcaggtggatcacctgaggttgcgagttcgaggccagcctgaccaacatggagaaaccccgtctctactaaagacacaaaacttagccaggcatggtgacgtgtgcctgtaatcccagctactcgggaggctgaggtgggagaattgcttgaacccgggaggcagaggttgtggtgagctgagattgcgccatcgcactccagcctgggcaacaagagcgaaactccgtctcaaaataaataaataaataaattatttaattgaccagatagggactcccagcccttccttcctggggagctccaggagctggctgggctgggcttaatctttcctcccaaagaaccaaaagaaaaagagatgcacatcaaggtttgctggggaccctcaaaggaaaagaaacgatgtaactcgagtagaggataaacgctttgttcagctgatttgcatcaggggcacctgaagatcaagcgactccccagttaagcagagtcagggtgggaaactgagtctgtgtcctagaggtctgggtttaggcagtcattttgggttttgttttgttttgtttgttttgaaacggagtcttgctctgtcacccaggctggagtgcaatggcgctatctcagctcactgcaacctcctcctcccaggttcaaacgattctcctgcctcagcctcccgagcagctgggattacaggtatgcaccaccatgcccagctcgtttttgtatttttagtagagacagggtttcgccatgttggccttgaactcctcgcctcaggtgatctgcccacctcagcctcccaaggccagaggatcactttaagcccagtgtcaggcctctgagccgaagctcagccattgtaacccctgtgacctacacatatacgtccagatggcctgcaggagccaagaagtctggagcagccgaaaaaccacaaaagaagtgaaacagccagttcctgccttaactgattaacccaccttatgacattccaccattatgacttgttcctgccctgccccaactgatcagtcgaccctgtgacattcttctcctggacaatgagtcccatgatctctccacaatgcaccttgtgagcccctcccctgctgacaacaaataaccacctttaactgtaactttccactgcctaccccagccctataaagctgcccctctcctatctcccttcgctgactctcttttccaactcagcccacttgcacccaagtgaataaacagcctttgttgcttacacaaagcctgtttaggtggtcttctatacggacacgcgtgacacccaggagttcgagacgagtctgggcagcatagtgagttttcatctctaaaaaaaaaaaaaattaaaattagccaggcatgccttgtacgtgcctgtggtcccagctacttgggagactgaagtggtaggatcgcttgaggctgcagtgagccaagattgcgccactgcactccagcctgaaggacagagcaagaacttgtctcagaaaaaaaaaaagaaaaaaagaataagaaaaggaaaaaaataaaaaaggaaggaagggagggagggaggggcagagagggagagaggaaggggggaaggaaggaaagaaagaaagaaagagaaagggagggagagagagaaaggaaagaagggagggagggaagaaagagaaagaaaaaagaaagaagaaagaaagaaagagaagaaagaagggagggaggaagggagggagggagaaaaggaggaagggagagagagaaagaaaaagaagaaagaaagagaaaaaaggaaggaaggagggagggagaggaaaagaaagaaagagaagaaagaaagagaaaaaagggaaagaaagaaaagagaaaaaagagaaagaaagaaagaaagaaagaaaagaaaagaagggccgggcgcggtggctcacgcctgtaatctcagcactttgggaggccgaggcgggcggatcacgaggtcaggagatcgctgaaaccctgtctttactaaaaatacaaaaacttagccagggtggtggcgggcgcctgtagtcccagctactcggaggc[144 bp omitted]aaaaatcatttcaagggtaggcgacgggagccttgcggtttagccgctagtcaacggatgggggggagtggtagcaaaaacataaaaatggggacaagagagaaactggagactccccaacctgtctgtttccgcccttttacagtactgaggggaaaaaaaagccttctttccttgggaaatgcaggaagccagcaagcggccggagtctccggagcccgcaaggaggcgcgttggctgcgcagagagcgcgcttcccagctggagagcctaggaacggtggcgcgggcggaggcgacagcgaggacccaaggctggggtttcctgcttggatcaggagtgcctggggagtaagttctacaggaaatgtcaatctactggtcgtgggggtcagactctggggtcgggtcgatcgggtcccgggggcggggggtgggacgggggtgggcaggcaggagtgcgggcgctgggatcccctgcctgctcggctcccctctcctccccctggtcccttacaccgtccattttgaggaaggggtcaagaagcgagtacaaaatgtctgggcaggacgaatctctgtagtcggtccttcctggcggcctcgttaggttgatttatttcaacagtttgatccccatcctggtgcagctccgagacgctcctgggctgcgcgcgcttttgggctgcgccaccgacagagacatctggaagccggagctagtggaagagtaagtgtgcctgagtgtccgtactaagggcgggaccgggccggggcccagggacttgagagttgctgtctgcaaaagcctcattgtctctacccttccgggaggaaaggggaaggcacgaatgacccacgtgttcagaccccgagcgcgcccttcaccttggcccagggagaagggcgcttcccccataccgtgctgcagcgttgcgaaagcgcctgtccccgggcttgggcagcagagatgcccgcatgcagcggttgcaggggttgtgttctttgcatccatgaaagtattggagctggccgggcgcggtggctcacgcctgtaatcccagcattttcgaaggccgaggtgggcggatcacctgaggtcaggagttcgagaccagcctggccaacatggtgaaacccccatctccactaaaaataccaaaattagctggccgtggtggcatgcgcctgtaatcccagctactcaggaggctgaggcagtagaatcgcttgaacccgggaggtggaggttgcagtgagccgaaatcgagccattgcactccagcctgggcgacagagggagactctgtctcaaaaaaaaaaataaataataataataataataattagccgggcatggtggcgggcgcctgtgatcctagctacacgggaggctgaggcaggagaatcgcttgaacctgggaggtggagattgcagtgagccgagcgcctgtaatcctagctacttgggaggctgaggcaggagaatcgcttctacctgggaggtgaaggttgcagtgagccgagatcgtgccactgcactctagcctgggcgacagagcaagactctctctcaaaaaaaaaaaaaaaaaaaaaaaaagtattggattggagcctgttgtgatgagggtgaactgaaaagtcctgggcagggccagacgtgcaggatgcactggtttcttacgagaaagagctttttttttttttttttttttgagagggagtctcgctctgtcacccaggctggagcgctgtggcgcgatctctgctcactgcaagctccgcctcccgggttcacgccattctcctgcctc[134 bp omitted]ggcctcccaaagggctgggattacaggcgtgagccacagcgcctggccagataaagagctttgagggtttgagttccgtgtgctgaacatggtcttttatgggaactgagacctcagcagaggaaatatataaaaaggacaagctgcaaggagagtggtgtgaaggtgtcaggatcaaaccccacggtcggaacaagatgcatttttatcactaatccgctccggtgaggtctgatttactggaactcagggcaaaggtgggaatgtgtttcatcagccaggtatatcttcgtcatggacaatcaggcaaaagccaacctcagcctgctcacctgagctgactcacaatgatgcgttgtttttctttttcttttcttttctgttttttttttttttaaactactgtcctgagctgatgtgtctgaggttactagggtcagaaccggcgctccaattgtattggggaaaggacggaattcagggaaacttaaattgaaataggcggttttatcttcttaggtaggcttacagctgagatgcgtgtaatggggttatcatcaggtgtggctgtttccttgggaactataaggtcaagatagacgtggaatgttgtgtctcaaaaactcttatttacagctcagcccctgagttgcacaggcttgcttctgtgtcaaagtgacttgga[138 bp omitted]gcctc[134 bp omitted]ggcctcccaaggtgctgggattacaggcgtgagccaccgtgcctggccaatatatatgtatatatatttttatacatgtatatatataaatgcatacacacacacatatatataaatatatacacacatatatttatgtgtgagtgtctatatataaattcagctttttctcatatgattaatttaatttttaaattattaatggtttagaaaagttttgagtccgcaattcattgctgacagtgtcatgtaaacgtttagatttgtcctcaaattgagggaacttgccatcaagtttcttccaaatatcatgtaagttgtagattttatggcattctaacattttatgaacaaatgactcatcttatactatttaagttgaccacagtcattaaacggtcatcagatgtcacatttggagcaggaagagttttgggggtttgtttttgttttgttttaatagaaaaaaacttttatatatatatatatatatatatatttttttttttttttttgagacagagtttttctcttgttatccaggctggagtgcagtggtgcaatctcgtctcaccgcaacctctgccttccaggttcaagtaattctcctgcctcaacctctctagtagctgggattacaggcatgtgccaccatgccgggctaattttgcatttttagtagtgatggggt[146 bp omitted]tgcgtttctcttccagggctcacaccctcgaacttgcctccctttgttcatgacatttactagttggagtccctgggtagtcagaatggcagaacgtccacgcctgtgcatttgtgtggttgttccttgtgtcgttgaaagttagacctggccaggcacggtgactcacgcctgtgatcccagcactttgggaggctgaggtgggaggactgcttgaccccaggaggtcaaggctacagtgagctctgatcacaccactgcactccagccagggcagcagagtgagaccctgtctcaaaaaagaaagaaagagagaaagagagagaggaagagagaaagagagagagaaaaagagagaggaagagagaaagagagagggaaggaaggaagggagggagggagggagggaaaaagagagaggaagggagggagggagggagacagaaacatcctaggttggtcaggcttcgtggctttaatcccagcactttgggaggctgaggcaggatgatcgcctgaggtcaggagttcaagaccagcctggccaacatgatgaagtcctgtctctactaaaacacacacacacacacacacacacacacacacacacacaaaatagccaggcgtggtggtggtcgcctgtactcccagctacttgggaggctaagacaggagaatctcttgaacccagaaagcagaggttgcagtgagccaagctagtgccactgcactccagcctgggtgatagagcgagaccttgtcttgaaacatatataataacaaagaaaaatttaaacaaaataaaaatgaaagatacatcgtaggtggtgtgttcatcacatcagtgtaactataatggctgtttgttgccgggcgcggtggctcactcctgtaatcccagcc[231 bp omitted]tcaaaaaaaaaaaagctataatggctgtttgtccctgtacaagtcaagctaacattggtggggtagtttctggaggtgagagagcctcttacctcttttttttttttttttttttttgagatggagtttcgctcttgttgcccaggctggagtgcagtggtgcaatctcggctcaccgcaacctccgcctcccaggttcaagtgattctcctgcttcagcctcccgagtagctgggattacaggcgtgtgccaccacacccggctaattttgtatttttagtagagacggggtttctccatgttggtcaggctggtctcaaactccctacctcaggtgatctgcctgcctcagcctcccagaatactgggattacagccttaggccactgcacctgcagagccttacctctgaaagttgcattcctttacgcccagcaagtcctgagtgatgcctccgtaccctgctaatgactgcctcccctttctgtgtccaccgacgtgtcttatttcctgaatcagttgttttattaaggttgcaaaatgatgatttttttttgttgagatagggcctcattctgtcacccaagttggagtgcagtagtgcaatcatagttcactgcagcatcaacctcctgggctcaaatgatcttcccaccccacaacctcctgagtagctgagactagaggcgcacgccagcgtgcccacctaatttttaaattttttgtagagatggggcctcgctatgttgcccagggtggtatcaaaatcctgggctcaagtgatcctcctgcctcagcctcccaacatgctgggattataggtgtgaaccacccagcccagcccaaaatggtgatt[222 bp omitted]gctgaggcaggagaattgcttgaacccaggaggtggaagttgcagcgagctgagatcgtgccactgcactccggcctgggcgacagaatgagaccctgtctcaaaaaaaaattttttttaatatatatatttttgttatattagctgggcgtggtggcaggcgcttgtggtcccagctacttgggaagctgaggcaggagaatcacttgaactcaggaggcagaggctgctgtgagccgagatctccccactgcactccaacctggatgacagaatgagaccttgtgtcaaaaaataaaaataaaaaaatgaatatgtagctggaattctgtagttttccgtcatccgtaaggctattccgtttcttttcttattggaaaggcaaagtaaaggcttaatttttcctctttattaaccaaggcttgtgtttttttccccctctggttttctctgtctgggtatcattatgagcgcaggtatttttagtgttcagtgtgtttccatcaattgcaatgattcactttgtagttcaaatccggccgctgggagacgtttccagccgctgtgcatcctcctaacgcggtctagggcagctcccctgccatctggcaccgcaaggctcacactgggaattttctgttcccagatcagccatgtttccgagggtgttcattgcctcctgcttcttaattcttctaagcattttctatgaatagactgaccagggaggcattgggtgtgtgtgtgtgtgtgtgtgtgtgtgtgtgtgtgtgtgttcgtgacgatatgaagccttttcatcttatatttgaaactttttcctcttacact[131 bp omitted]acctcccagattcaagtgattctcctgccttcagcctcccaagtagctgggattacaggtgtgcgccaccacgcccggttaatttttgtatttttagtagagacagggtttcgccatgttggccaggatggtctcaaactcctgacctcaagtgatccacctgcctcggcctcccagagtcttgggattacaggcttgagccaacgcgcccggcccaattcaccttcttaaagggtgcaattcaatggcttttagtatattcacagacgtgtacgtccctcaaatttagaacatttccatcacccctgaaagaagccctgtatccttcagtggtcatctcccagtccctcatctcccccagccctggacaacctctgatctgctttctgtctctatagattcgcctattctggacatttcattttcaatggggtcatacactgtggtcttttgtgtctggcttcgttcactcagcatcctgttttcagagctcactgggttgtagtgtgtgtcagtgcctcagtccgttttatggctgggtaatattccatggtgcggatagaccacgtttgctttctttgttcatgcattgatcagtattgggttgtctctactttgggctgtaatgaataccgctatgggccaggtgcggtgctcacacccctaattccagcactttgggagggcgaggcgggcggatcacttgaggtcaggagttcgagaccagcctggccagcatggcgaaatcccatctctactaaaagtacaaaaaattagccaggtgtgatggcaggcacctgtaatggcatctaatcgggaggctgagacaggagaatcacttgaaccagggaggcggaagctgcagtgagctgagatcgtgctactgcactccagcctgggcaacagagtgagactccgtctcaaaaaaaaaaattgcaattagattagcggctgccagcagctgggtgaaggggagaatgggaagtgactgctaagggggatggggttttattttgcggtgatgaaaagtatttggaactaggtagaggtgacgtttgtacaacattgcaaatgcactaaatgccactgcattgttcacttaaaatggttaacttcatgatatgcaaatttcacctcgattaaaaaaaaatgctgcttgaggccaggaatttgagaccagcctaggcaacatagtgagaccccatctctatgaaaataaatatgaaaaattaggaggcatgggggcccatgcctgtaccttcagctactcaggaggctgaggcaggaggatcacttgagcccagaagtttgaggctgtagtgagccatgattgcactactgcactccagcctgggcaacaggacaagtctctgtctctaaaaaattaaattaaaatataggtgtgtgtgtgggtgtctgtgtggggggcgggggtggggggatgggggtgtgtgggtgtgtgtgtgagtgtgtgtgtgggtggggggatggggtgtgtgggtgggtgggcgtaagggggttggagtgaggggatgggggtgtgtgggtgtgtgggtgggtgggtgtagagggggtgggggttgtgggctgtggtggggaagtgtgtgcacacgtgcatttatatgctgagattaatgtcaggcaggatccacatacgagtgtggggaaggcagggtgcctggattctcatagctccattcttctcccaagctctgcctcacctgcctccttgaaggaaacacggggaagccaggactggccgtcacgttggtgacaaatatgtcccaggtaagttggcagctcaccctctcccagaagcgtgttgtcgttcccacgagtcaatgtgcctctgcctgtggctgggagtcaggtaaagcacatggagccaggcagggccccccgccagccgtgctgccctaggtctctgcacctctgcttggagagagatgctgccctggggattctcctgggaccacccccaccccagtactgactggtcctttccacacctcatcctggctgccagtgggcttcacgttctgctgcaaagcacactaagaaaggagctgaaagtgtctttggtggggtgcagtggctcaagcctgtaattccaggactttgggagggtgagacaggagaatcatttgaggccaggagttcaaaaccagcctgggcaatgtagcaagaccaccgtctctataaatataaaacaaatttgcctggtgtggtggtgcacggctgtcgtcccagctacttaagaggctgaggtgagagaatcgcttgagcccaggaggttgaggccacaatgaggagtgatcactccactgcattccagcctgggtgacagagtaagactgtctctaaaaataataataaagtaaaataaaaagaaagtgtttttgtcttaaggaactcagggtctcacaggggacactaggcgtttatggagcgggcagtggcagcatctcccgcaactgtcatgacctgcagatgacaagcagtggactgagacgtgccccactccaaattttttttttttttttttttttgagacggagtttcactcttgttgcccaggctggagtgcaatggcatgatctcggctcactgcaacctccgccttccaggttcaagtgattctcctgcctcagcatcccgagtagctgggattacaggcacctgccagcacgcccggctaatttttgtatttttagttgagatggggtttct[132 bp omitted]tagtttgttataacagcctgaacaggctaatgcatgagaaagacacacagttggtcaactggtagagattgaagtccggtcgcgtgactcaggtactctttttcctgagacagggccacaggtgatggtgtgtgctggctgtcccagctacttgggaggctgaggtgggaggatcgcttgagcccagcagttcgaagctgccgtgagctgcatttgcaccactgcactccagcctgggtgacagagcaagaccctgtctcagaagaaagagcacctgagtcatacgaccggacgtcagtctctaccaatcgactgtacctcttcctgttgcattaggctgttcaggctgatgaaactatcacagatggggtggcttaaacaacagacattgattttctcacagttctgcaggctggaagtccgagatcaaaatagcggcagagttgcttccttctggaggctccaaaaaagaatttgttccatgctcttacctagctgctggtagtcactggcgtccttggcattccctggcttgtggacccatcactccagtctctgcctccctcaccaaatgacattcttccctctgtttccctccctctgtccacatttccccttctttttttttttttttttttaatttatattttgtttgtttttttgagacagggtcttgctctgttgcccaggctggactgcagtgggaggatcatagcttattgcaacctccacctcccaggctcaggcaatcctccctcctcagcctcccgggtagctgagactacaggcacccgcccacactcacgggtaatttttttattttttgtagacgggttgtcactgtgttgcccaagctggtcttgaactcctggcctcaagcgatcgtcccacctcaacctcccaaagtgctgggattacaggcatacgccactgcagctggccagatttcctcttcttataaggacaccagtcactggattagggcccacccaacccccagtacaacctcatcttttttttttttttttttttttgagacagtctcactttgtagcccaggctggagtgcagtggtgtgatctcggctcactgcaacctccacctcccaggttcaagcagttctctgcctcagc[135 bp omitted]gcctcccaaagtgctgggattacaggtgtgagccaccgcgcccggccacaacctcatcttaattcattgacatctgcaaagactctagttcacaaatcaggtcacctttgcaggtaccaagggttaagacctcaacctacctttttctgtggagaaaggggtcacagttcaaactgataacaggacacccctccgagccaaactgcatgtgttattttaggactcggtgaccttcgcagacgtggctgtgaacttcaccaaagaggagtggaccctgctggacccagctcagaggaatctctacagagacgtgatgctggaaaattctaggaacttggcattcataggtaaggaggcccccttcctgcacttagtccgtgatgggaccagtgctggtttggaaccgtgttctgggaagtgcattggaaaatgggaactgggttaaattccagagacacagctgctgccccccaggtagtaggtgtagggttcaccatgaaactggaagtcagtttgttgcattactttatttattttattttatattttattttattttattttattttatttattttttgagacagggtctcactctatctcccaggctggagtgcagcggcatcatctcagctcactgcaacttccaccccccaggttcatgcaattcttctgccttagcctccctagtagctgggaatacaggtgcacaccaccacacctggctaatttttgtttgtatttttagtagaggcagatttcaccacgttggctaggcttgtcttgaactcctgacctcaagtgatcctcccacctcggcctccggaagtgctgggattacaggcgtgagccaccacacccagcctttatttttcttttcattaagatggggtctcaccctgtcacccaggctggagtgaagtggcaccatctcggctcactgcaacttccgcctcctgggctcaagcaattctcctgcctcagcctcctgagtatctgggattacaggcatgctctaccacccccagctaatgcattacatttttattctcttcgtgattgaacagaatttgggggatccttatgtaggtgaacatggtgcacaggaaaagggtcgttttgagcccttttggcagagttttagtgcattgatgagaaaagtagagggaccactgttgcacttctattcacacatcatcagcttcagaaccccagcaaaccaaagcctgtgtccatttgacagaaagtctcggcacagttcctttataccacatgcttgcccagtgagcaggatttcaactaggcaaacccagtctgccctctcatttggagcaagaagtggtctgaaaacagtgcagggcagttttgtccaggcatttatgcatctcagtaccaggtagatgtgaacattacaggaccaacaggtttgtaagccagcagcatggtaacagagcaacaggctcgccactgagacagcagggtttgcaacagagaaaagagaaagttgcatgattacatggtgccaaccgaggagatgggaggagacgctcaaattcttctccctggggggttctggggtttttgttttttttttgtttttgagactgtgtttcactcttgttgcccaggctggagtgcagtggcgcgatctcggctcactgcaacctccacctcccgggttcaagcaattcttctgcctc[132 bp omitted]ctcggcctcccaaagtgttggcattacaggcatgagccactgctctcatttttaaggggatcatggaggataagggactggagaattggagacgttgattggtcagaggaagggggatgaaatcatcgggatgaggaaagtacattctttggtgcgtcagtttctcacggcattcctcagatcagtgagcatagtcatttcatcagaatgcaggacctgaaggaatatctcaaagagaaaacttaatgttttataattttcaagttgttatctacagagcagctaaggagacctataggccaggcacagtggctcacacctgtaatcctagcactttgggaggctgaggcaggaggaggattacttgaggccaggaagtcgagaccagcccagccaacatggcaaaacactgttctttttgtctttaaaaacaatttttttttaattaaaaggaaaaaaaaagaaagaaaaaaacaggcactctgttgcccaggctggagtgcagtggctcagtctcagctcactgcaatctctgcctgccggattcaagtgattctcctgcctcagccccctgagtagctgggattacaggcacacgccaccatgcccagctaatttttctatttttagtagagacggggcttcaccacattggccaggctggtctcaaacgcctgacctctggtgatccacccacttcagcctctcaaagtgctgggattacaggcgtgagccactgtgcctgtccaagcttatgttttttgacttttatccatcctctcatattttcatttttccctgctaaaggcctgttccttttctccttaaaattgcacatggagccagctactcgggagactgaggcaagaggatcacttgatcccaagagctcaaggctgcagtgtgctgtgatcacacctatgaatagccagccactgcactccagcacctgggcaacctagtgacaccctcatctcaaaaaaataaaaatttcacatggactctctgtccaattctcttccacttagaattcctgatcgtttccttgatctctgcagaactgttcctcagtaacatgacactctccatgttgaacccctgaccttaccgtcatcacattcctgacactgcagaatctctgatgtctttctctgcttccttcctcttgctttcttccccttcacatttttatcatacatgttgagtgaacatttagaaagaaatccacacagaggcctggcgcgttggctcatgcctgtaatcccagcactttgggaggctgaggcaggtggatcacatgaggccaggaattcaagaccagcctggccaacatggtgaaaccccatctcaactgaaaacacaaaaattagccaggcatggtggcacgcacctgtaatctcagctactcaggaagctgaggccagagaattgcttgaacctgggaggcggaggttgtaatgagccaagatcatgccactgcactccagcctgggccacagagtaagactctgtctaaagaaaagagagaaagacagagagaacgagagagagagagaggaaagaaggaaggaaggaaggaggaaggaaggaagggaaagaaagagaaaagaaagaaaggaaggaaggaaggaagaaagaaaggatggaaggagcgagggagggagggaaagaaagaaagaaagaaagagagaaatccacacggagattgcctatgtcatcatctctaacccacctttactttcaacaaagaatttaacttttgtgccactgtatttcagattgggcaactccatgtaaaaccaaagacgcaacccctcagccggatattcttcctaaaagaacatttcctgaagccaacagagtgtgtctcacgagcatcagttcccagcactccacattaagagaagactggagatgccccaaaacagaggaaccacacaggcagggggtgaataatgtgaagccacctgcagttgcccctgagaaagatgaatctcctgttagcatttgtgaagatcatgaaatgaggaaccactctaaacctacctgcaggcttgtgccttcacagggagattccataagacaatgtatcctaacacgtgactcaagtattttcaagtataatcctgtcttaaacgatagtcaaaaaacacatgaaaacaacgaagacgatggagtcttggggtggaacattcagtgggttccgtgtgggagaaaaacagagctgaaatcaagcacatggactggcagtcagaacactgtgcatcatatacgtgatgaaattgatacgggggccaacaggcaccagcggaatccatttggaaaagctttccgtgaagacggatcccttagggcacacaacactcatggtcgagagaaaatgtatgattttactcagtgcgagaacacctccagaaataactcaattcacgccatgcagatgcagttgtataccgcagagacaaacaagaaggattgtcaaactggggcaacctctgccaacgctccaaattccggttcacacaagagtcattgcactggagagaaaacccataaatgccccgaatgtgggagagcctttttttatcagtcattccttatgagacatatgaaaattcacactggagagaaaccgtatgaatgtgggaaatgtgggaaagcctttagatattccttacaccttaataaacatttaagaaagcatgttgtgcagaagaagccctacgaatgtgaagaatgtgggaaagtcattcgggagtcctcaaaatatacacatataaggagccacactggagagaaaccctataaatgtaagacatgtggaaaagactttgcaaagtcgtcaggacttaaaaaacatcttaagactcacaaagatgagaagccctgtgaatgaaaggaaggtggaaaatttttcattaattttctgactgtaccaaacatgtgaggaggacatattggaagggagctcaaggggttagcatgagtgagaacatcttccctgaactctcgtatcttacagaaatgtgaaaaaaaaccctgtgaaggtaaagtctacagaaagcctttcatcttcattcatcttgagtagacatttgttctcaccctggagagaaactgcgaatctaaaaggaatatgacaaagccttcagcgtggtctcaaattcatggttcatacaagaactcacactgcagagactc[136 bp omitted]cccgtctctactaaaaatacaaaaaaaattagccaggcgtggtggcaggtgcctgtagtcccagctacttgggaggctgaggtaggagaatggtgtaaacctgggaggtggagcttgcagtgagccgagatggagccactgcactccagcctgggggaaagagcgagactccgtctcaaaaaaaaaaaaaagtaggaaagacctctttaaacacttaccactcatgttgcatgtgaatccacatcctgaagggaggctacaactggaataaaaataagaaagctttcaaggcctggtgcagtgactcacacctgtaatcctagcactttgggagtccaaggtgggggattgcttgagtccaggagtttgagaccagcctgggcaacatggagaaaccccatctctacaaaaaaaaaaaaaaaaatgcaaaaattaaccaggagtggtagcacatgcctgtagtcccagctacctggggagctgaggcaggaggatcgcttgagcctgggagcttgaggcagcagtgagctgtgtttgcaccactgcactccaccctgggtgacaaagtgacaccctgtctcaaaaaaaaaaagaaagctttcaggtccagcctttcacttaggcacaatgagcgcacagtaggactgaaacactgtaaatgttcatgattttccagtttttcctttctaaaaaaaaaaatgctacaagatgaaggatatccctctttgcacactcccagctctgccacataaatgttggtatatagcaggttcattataactcacatacacgtggtctcattttcaatgtgaagccttctttgagcctcattcaatttagacttgggattcatatactccatgataccatttttgtcttattggtcactgttcaactgcattatggtcagagtatgtggtctttctggtaccaacttgggttacttgttatgactttgtcagtctaatgtgccctattctgtcaacttccctgccacctccattcttctcatcttctttactaagggcacatagattcactttccacaatgagcactatttaatgtcttatttttatttttattttatttatgtatgtatttattttgagacagagtcttgctctgtcacccaggctggagagcagtggggcaatctcgacttactgcaacctctgcctcctgggctcaagtgattctcctgcctcaccctcccgagtagctgggattacagacacccaccaccacgcccagctaatttttctatttttagtagagacgagatttcaccacgctggccaggctggtctcaaactcctgacctcaagtgacctgcctgccttggcctcccaaagtgctgggattacaggcataagccactgtgcccggcctcttttcaatcttttaaaagttgggaaacggccgggcatgttggctcatgcctgtcaccccagcactttgggaggccaaggtgggcggatcgcctgaggtgaggagttcgagaccagcctgaccaacatggagaaaccccatctctactaaaaatataaaattagccaggtgtggtggctcacgcctgtaatcccaactactcaggaggctgaggcaggagaattgcttgcatctgggaggcggaggttgcggtgagccgagattgtgccattgcactccagcctgggcaacaagagtgaaacttatctcaaaaaaagtaaaaataaaaataataaaaaataaaagttgggaaatatgactacctgaaaatgcatgaaaatgtacatatacattttttttttcgagatggagttttgttcttgttgcccaagctggagtgcagtggcgtgatctccgcttactgcaacctctgcctcccaggttcaagtgattctcctgcctcagcctcctgagtagctgagattacaggcacctgccaccacgacatttcaaagttaataaagtgatcacccttatacccaccatccaagcccgtaaacagctcatcattaaacaccaggcaattcacgtctgtgcctcacagacgacatctccagccccaagaggaaaccgccatggttcattttgtatcattcgcccccctcgctcatctttatgtttgcagctatgcagaaatccccaaataccctgttttctagtttcgatgatgtttatgctgcgtatgatggcatggcatagaatatttctttgtgccttgcttctttcaggaaaagaaaagctaagcaggtagggtgcaggtggcattcattctttcttagttatattcattccagagaccctggatctgtatctcactttagagattataaacatgctgctaacaccaatttt[222 bp omitted]gaggcaggagaattatttgagcccaagaggcggaggttgcagtgagccgagatcgtgccactgcactccagcctgggcaacagacagagtgagactctgtctcaaaaaaaaaaaaaataggccgggcgcggtggctcatgcctgtaatcccagcactttgggaggccggggtgggtggatcacttgaggtcaggagttcgggaccagcctggccaacatggcgaaaccccatctctactaaaaatacaaaacttagccaggcatggtgcagacatctgtaatcccagctacttgggaggctgaggcaggagaatcacttgaacaagggaggcagcggttgcagtgagctgagactgcgccactgcactcccgtctgggcgacggagcgagatttcgtctccaaaaaaaaaggaaaagaaaagagaaacgccactggtaagagcagaggtcctcctaggcgcgcattctgcatggccccagcactgttaagttcagctttcagtgtttggggaagacctgcaggtcagggacccccactgtggctgagggggctcaagcttggccctttctcccggacccctgctgcctgcgtttcccagcaatctgctgctttatcctagaatctgggtgactcatggccctccccatcctggaaggaatgaagaggaggaggggaggctgctatgccaggacagtcccagaccttgccaaggggcctgggtccactcccacccccagggagcgctgtgcggaggaaaaggaccatggctgaaatcagaatccctggattcaaccgggggtggagggggccggggcgggaggggggaaacatctgtagctgagggaacacccctcccgcctccagtcgctgaggctgaacttagccgactttggggattccccaccctctacccccaactggtcctcaattctcacagatgtaaactgagaattttcaacaatcgttttggcaaacatacgccaggcccccttctgagcgctttgcacctattaactcatgcaacgcctgcaacgctatgaagtggctgctgttatcactaccattttacagtggggggaactgaggcacagcgaggccaagcacgatgcccaagatcacacagccagcaggtggccgggaggggctcgaccccgtgctgtcaggcaccagagactcggctcttcagccccaggccagagcctccctgcactgacggggtcgcgaattcgggcaggagggttcgtgtgtgtcctcacctctgggacgcgagctccggggacgggggacctcgtctggcgtgggaggcatttagtgagcgccgtggactgaagccgggacggtcttaggagaaccacttcccttcttggccgcctgaaaccccctacagggttctgcttctggaactgcattcgaggtcagagtttctagtacgagtaaagcggatcctcgggaagagacccgaccagaaggaaatcgccgtcttggaagatctaagtccgggatggaacaaaacccactccgggcggggggagcgcgccacctggcggcggatcctgctaaggcagcgccgcccggagaccagaaacgttggatttgggcagtgggccgaggtggttggaattggcgaatgggcagttgtctgaaaatcattgtgtgaaactaaggactgtctaccagtggcttccaaaattctgacgcacagtaagaaatcattttgcgtcagcatttttttttttttttttttgagacaaggtcttgctctgttgcccaggttggaatgcagtggcacgatctcggctcactgcaaactccacttccagggttcaagcgattctcctgcctcagcctcctgagtagctgagattacaggcgcccgtcaccgcgcctggctaattttttatttttagtagagatggggttttacaatgttagccaggctggtctcgaattcctggcctcaagtgatctgcccgcctcggcctcccaaagtgctgggattgcaggcatgagccaccgtgcctggccgcatcagcatacttttacaaaagaataccaccctctatagccaacaacaatggattgtatacttcaaaatagctagaacattttgcatgtttcaccgcaaagaaatggcaagcatctgggatgatggatttgctaataaccttgatttgatcactgcacaatttatatatgtatcaaaacatcacgccgcatcct[132 bp omitted]aaaccccatctctacttaaaaaaaaaaaaaaaaaaaaatttgctaggtatggtggcgggcacctgtaatcccagctactagggaggctgaggcaaagaactactttaacccgggaggcagaggttacagtgagccgagatcgcgccactgcactccagcctgggtgacagggcgagactccgtctcaaaaaaaagaaaattttagttttaaaaataccaccctgtattacacggccctgtattacacgatgctttatattccactctattccttttttttttttgagacagagtgtcactctatcacccaggcatgatctcggctcactgcaacctctgtcccccaggttcaagcaatcctcctgcctcagcctccctcagcctcctgagtagctgggattacaggctcccgccatcatgcccagctaatttttgcatttttagtaaagacggggtttcaccatgttggccaggctggtctcgaactcctgtcctcaggtgatccgcctgcctcagccccccaaggtgctgtgattacaggcatgagccaccaggcccggcctattcctatttttaaatgctggtcaggtcaccttaaaatggtttcctgactctctaagggtctgggatagggttttccactgttctagattatccccatgttttttcacttgacagagattatgatgaggaaccggttacacccacgctacctcccagtgagccttccccaccacacaaagctgcctccaggattcgctgccagctctgatgtcaggatgagtaacagctcaggatgctgaagacactggcccaagaccacacagcctggatgtggcagtgcctgtttctgcctcactcctggaggaggaaaatgattaaatacccgtaatttcactgctattgagtacaatttaattcatccttcctccactttggctgataagattgagctgcactcacctgctgttctcttaggctgtagcataaggcattccagaggtcaaactttaaaatgtctttttcactttgggaggccaaggcgggaggatcactggaggccaggagttcgagaccagcctggccaacatggtgaaacctccatctctacaaaaaatacaaaaattagccgggcgtggtggcacacatctgtagtcccagctgctcaggaggctgaggcatgagaatcacttgaacctgggaggtggaggctggagtgagccaagattgcaccactgcactccagcctgggcaacagagcaagaccctgtctcaaaaaaataaaaaatcaaaaatctaggttgaattctcaggtgtctctaaagtggccttcgatgtattctgcgctgggtgctgcagggttgaccatctaaaagtggcgagcccagccccagtccaggggaaggtagaggaagtgaacctgctcattgtaggactaggacccttgaggtgacagagagctgtggttagcctgagtccatcgcactgtggtggtctatgaggccgctttgcaggggcagcaaatcagaaggctcggtctgctgtgcttactctgctatctttggaaggaaagaggaggaaatcgctccgaaatgggagatagggctggtggtcacgactcagctccacaccaagatgagacttcctgggcccccagggaggaagaatagcagttccactgccaggagccacgcctcagaggagctgcctttccacctccctcctgaaatgccattttcaaatttctcctttactcttccatccccagaacctagtacaatatatggcacatagtacatgctcaataaatatttatcaaattaatgagaaaagatatgtggatgtcccctcctgtgcagctgtaaggggagaaatagagttctttttttttttttttaactttcctacaccagttttatttaaaacacaaaaataagtatttctctttctgtaaggaaaaatggctcaaatattgctgaacacaggccagactcagtggctcacgcctgtattcccagcactttgggaggtcgaggtaggagcacacttgaggtcaggggttcgagaccagcctggccaacacggtgaaacccccatctcaaatacaaaaaaaaaaaattagccaggcatggtggcaggtgcctgtaatcccagctacttgggaggctgaggca[137 bp omitted]tcctttccatctttatcgctgtcctgctaatagtcacatgtagttctgagcatttactacttgccaggtactgttctgaggctttctgtgtatcagttcattttattctcacacaaacaagtatgtactattatcaagccattttatttattaatttatttattttctgagatacagcttcactcttgtctcccaggctggagtgcagtgtcatggtctcggctccctgcaacctccgcctcccaggttcaagagattctcctgcctc[223 bp omitted]cacaaaaaagtatgcactatgatcaagccattttaaggggaggctcagggtgctacctggattaggaaggtggatgatagattatctgtttggatttgaacttttttttttttttgagacactctcactctattaaccaggctggagtgcagtaccatgatctcggctcactgcaacctccgcttcccagattcaagcaattcttgtgcctcagcctcccgagtagttgggaagacaggtgcacatcaccatgctctgctaatttttgtatttttagtcgagacagggtttc[142 bp omitted]attaaattttgacagggcatttggcatgactcaactacaggaaagagttatcaaggtgttctaagccctctcactcctacacccacccccgctgcaggaaagggccaaagtcagctttttctctgtgaccctgtggctggagttagggctgtccataaataatccttcctttctctccttccaggcacatgaaaagactgcgcttcccggcgaccctttgaagttcggcgtaacctgctgacccgctctggctgagtgtgagctaagaggacaggtgtcatatcaggtccaagcctcgagagtcactgcctgctgtgccatcctctcttcttcccgtgccaaaggactggcagcactccagtgatggctgtgccatgggcccggggtacacgagtgatatggagcggagcgctcagctggcccacaaaggagagaaaactctgctgcctgaggaccacagagaatctgcagctgtgactgcagcacagcccagcctgccctgaccaacatag[131 bp omitted]agcctggccaacatggtgaaaccccatctcgactaaaaatacaaaaattagccgggcgtggtagtgggcacctgtaatcccagctactcgggaggctgaggcaggagaatcacttgaacccaggaggcggaggttgcagtgagccgagaacgtgacactgtactccagcctgggcaacaagagggaaacttcatctcaataaataaataaataaataaataaataaataagaacgctgaatgagtgagtgaatgaatgaatgaatgaatgaatggcagggaatcgggacagggtcacagattacccccaggctggaggtagaggaagcagccatggctgaagccagctctccacacatatactttatttccacagtcccattttcccatgctgaacctggcgtcttcgccctgacttttcccacacctgtcagcactggggggctcttggggagtaaggagctacagagacagggacacaggatgcgtggagagcctgggagatggagatgaggagagagagccggaaacaggaggtgggggatccacagggggccagggctcagcagacagggaaggggcagatatggagacaagacggacagacactgaccaggaagcccagagaacaggagatcaggagtcagagggaaaagcagtgtcaggagcagagagaaaggaaccgggagacacaggtgaggcggtgatgaagggcagatgaaaacagttgaaggggcaaaaagacagaggcctgccactgggagaaaaagacagagacccacaaggcaaacaggggaagtagagacacaaaaaaagaccccacagagagccagggcagggtgggggctgcgtgcccctcgtgttagccccgggagtctttgctggtggaggagcccgggccagtgctggaggcagggccggtgctggagacgtggtctctgctggacccgaggcctccgctcgaatcagacgctgtgcctccgctctccacaccaccctctgtgttttctccgcccctgctggaccccacgtatccagtggagcccaggtagctgctggcgctgacgggtctgaaggtcacgtggcccccactcgaggcactggtggagccgaaggtcacgtggccagtgttggggtcaccgtgcgtgatgtggctgggcaaatgcccagtgctggagctgaggccgccaaaagtgacgtggccaagagagccacggtctctgctagtcttgtggctcaaaatggacccggggatggcatgggggtgcctggtgggcaccaggacggtactggagccggccctctgggtgctggccaggtccacgctcagggtgccgtccagcttcgcggcggcggcggccaggtccttctggcgctgcgcctccgcctgctcctggagctccacctgcagggaaggtgaactgggccccgacacacactgaggcctggccccacccccgcaggccccactctcaccagcttctccacttggctcagcagctcctccctgctcatggggtagtcatcgctggcctcaaaacccggggggtcttctctggggaggggaaggaaaattggaaaagactagacctcagccctcaaaaaggccagcggcccttcctgctaaaccccgggagcctcagccattctcccaccagccccgagtgcccttcccttctggggcacccggggccccatcctcccacacaggtgccaagcccctactccttctggctgcctcgaagcacatacttcatattctaaccccccagggccacatccgccagccagtccccaaaagccccccaaaactctctatcctgtgtgttccctctgcccccatggaagccccgtcccctctgcgtccctcctgccctgcgcctcacagagtgtcagggggctgaagtggggccatcttcttcggaaggtcctccaggctctggcccagcactaggagggcagcgtcggccagggaggtgaagctctggagagtgtgggagcctgcggtcagctgggccacccccgagaccggcctcctgtcccggctccctgccgtctcccacctgggcatgtaggaaggcctgcactgtcaggagctccaccagccgcttctcaatgaggctcaggaagaggcccatgtcccggtctcccatgctggtcttgaccccaaggaggtcatcgatcatgctgctgtcgcaatgggccttggtgaagaggagctggatatctgcgtcatggagggccggttgtcagggatctggcaccgccagctgggtgccagccctctccccactcaggtcctcactgccccattctacagagactgcggtcaaggctcagagaccaaaagggagtcacccgagctcagccagccaggcagggggacggcactgctgtgcatccctctctccctgacttgtccttcaaagtcagcctcaagtgtcactgcctccaggaagccttcccagtgaccccagcagagccagcctcatgagtgtgagatccaggcagtggtgaggggcctgcacttggcttgacacgctgctgctcttcctatcttgaaaatctcagcaattttttaacaaggggcccctcattctgcactgggccccacaaattatggtcttgcaccccagactgagttagggccttctctcgcccccagtgcctgggcgtcctctgtcctagcccctgagtgatgagtgcccagtgcgcaggtcagtcccctccagggcctctccccactgtgcccacatcacctagcacagggctcggatcagccatcacgacagcaggaaggaggacctgcccatatctgagctcctacggtatgccccgaggaggctctccagctcgctccccaccaccccccacctttctctccatccgtcatcccttctaattctcatgacaaccctgcaaagtaggcactgccatccccattcccagagcggaaggaggaagccacacaccaaggttcacaattggtggagctgagattcaaacccaggacaggctgggtgcagtggctcacgcctgtaatccagcactttgggaagccaaggcaggcagatcatttgaggtcaggagtttgagaccagcctggccaccatggtgaaaccctgtctctactaaaaatacaaaaaaactagccgggcatggtagtgcaggcctgtaatcccagttactggagaggctgaggcaggagaattgcttgaacccgggagatggacgttgcagtaagcccagatcacaccactgctctccagcctggctgacagcgtgagattccatctcaaaaaaacaaataaaagctaacaataaatgttttaaaaaagagaaaagaaacaggacagcctgactcctgagtgctctgcatggctacttcctgaaaaataagaaagatgaggcccggcgcagtggctcacacctgtaatcccagcactttgggaagccaaggcgggtggatcacctcaagtcaggagtttgagaccagcctgaccaacatggcaaaacccccctccactaaaaatacaaaaattagctgggtgtggtggtgtgtgcctgtaatcccagctactgggaggctgaggcaggagaatcgcttgaaccaggagggggagattgcagtgagccgagatcgtgccactgcactccaacctggggaacagagcgagactttctcaaattttaaaaaataataataataatagaaaaaaaggatgcacaggtggatgcaacatacccacagaagggattaaaaaaaaaaaaaagaaactcagccaggagtggtggctcatgcctataatcccagcactttgggagtccaagacaggaggatcacttgagtccaggagttcaagactagcctggacaacatagtaaaatcctatctctaaaaaaaaaaagggccgggcacagtggctcatgcatatgtaatcccagcactttgggatactgaggcgggcagatcacctgaggtcaggagtttgagaccagcctgccaacatggcgaaaccccgtctctactaaaaataccaaaattagttgggcgtggtggcgggcacctgtaatcccagcaactcaggaggctgaggcagaactgcttgaacctgggtggcagaggttgcagtgagccgagattgtgccactgcactccagcctgggcaaaagagcgaaattcctctcaaaaaataaataaatgaaaaaaatctaaaaaaatttttaaaaaggaaactctagacccctacctcataccataatgcaaatcaatttgtcataagtcacagacttcaatgtgggagttcaaacaatgaaacttctaggagaaaacacagcataatgcctttgtaacctcaggacaggcaaaaatttcttaggcaggccacaaagtcattaactacaaaaagaaaatttcataaattagatatcctcaaaactaagaaacttcagttcatcaccaaaaaaaatgaaaaggcaagctacagtataagagaaaatatttaccaaaagtctagtatctagaatatacaaagaactccttcaactcagttatagcaagacaaacccaatttttaaaaaaacaagtgcacaagattgaacaggaactttacaaaaacatctgaatggccaatacgatgctcaatattattagtcaccagggaaatgccaattaaattaatagagagagtacg[143 bp omitted]cccgactctactaaaaatacaaaaattagctgggcgtggtggcgcacacctgtagtcccagctactggagaggctgaggcaggagaatcgcttgaacccaggaagcggaggttgcagtgagccgagatcatgccattgcactccagcctggtgacagagcaagactgcatctcaaaaacaaaacaagataaaaaatggctgacactaggaagtggtggaaaaggtgtggatcatcggggactcccatatgctcgcataggtgagagcataaaatcttgcgaccagtgtggaaaactgttcggcattttctaataaatatcaacatatacctaccctaagacccatcggtcccactgctaggcatttatagacagagatgtacatggatgatccatggatgaatactgggtagatggatggatgggtggatgatggatatgggacagttggagggacagcatctgttttttagtgttttgtgaaacaagtggaataatgcataagtgccttgcacagtgaatgacacataataaacattgctattatattttatcatcattttctttacaaataataacatttttggtaactaagactaagaagaaatttggtaactaagactaagaagaaatttggtaactaagactaagactaggaagacaaaagtcaaatgtcattgcagatagatggatgaacagatggatgtggggctgttggaggcagatggacagatagacaatggatggattgatggacatgggacagatggagggatagaccctggatggatggatggacatgggacagttggagggatagaccctgcatggatggatggacatgggacagttggaggaatagatcctggatggatggatggatggatggatggatggatggatggatggatggatatacggacagatggatataggacagatgaaggggtagatcctggatggatagatatgggacagatgaaggaatagaccctggatagatagatggatatgggacagatggaggtatagaacctggatggagagatagatataggacagatgaaggaatagatcctggatgaatgatggatacaggacagttggaggaatagaccctggatggatggatggatgggtggatgaatggatggatggatggatgaatggatggatggatataggacagatggaggggtaggtcctggatgggtagatagatatagaacagatgaaggaacagaccctggatagatagatggatatgggacagaatggagggatagaccctggatggagagatagatataggacagatgaaggaatagatcctgaatggatgatggatataggacagttgaagggatagactctgaatggatggatggatataggataattggagagacagacgttgaatggatggatggatggatggatggatggatggatggatggatggatatgggacagttggagggatcaaccctagatggatggatggatgcattgatagatggatggatggatgggtgtaggacagttggagggacagatgatggatggatagatggacatgggacagttggagggatagaccctggttggaaagatggacagatatggggcaactgataagcaagtgaaccaggttgtccatgcaatgcctccaagccccgcgggctgatggtgtccttccaagtggagaagccaggctcgggagggggcgcccatgggtgctcaccagccttgagcttctccagctgtccccgcacatcctggaagcgggcctcaaggcgctcagcctccgagtgcaccttgtccatgcgctgctgcaacaccttctgctgctgctcctgcagcaaatgctggtcatccttgctggcacgtgcgctcaccaaagcctcctgcatctgtggggacagggctgaatgctgggccagatggcagcctcgggagttgggggtgtggagctaggaagaagcaggaggcaggctgagggagggaagggggcggggaggccgggaggagaggaggagatggagagggcaggcctcactcacctccttgatctcttcctgcacatgctccagctccaagttctgctcgttgatgaagttgaactcagcaaagttgcgctcctcgactgggagagttgggcaaggcggggcccagagagagggagacagagaaacagagacagagagaacagagacagagaggcatacagaaggccaaagaaagtgaagatgaggaaggccacacagaaaccaaggcagagagacgaacagagaggagtcacagagacaaagaggtgtgggaagatacggcaggtgggacacagaaatacacagcaaggcagagagggaaagccagagactcggcaatagcaagggagatggggagatgcaggcggggagaacggtagatatgggtaaggagagaaacagagagggacagggttgagggaaggatgtggagagtgaccccaggcccaggagttaggagggggtggggaggggcagagacagggccacggtaagacgccagtggacgcgggcggcgggtcccaggcatgacgccttgttcctccagcacagatggaggagttccccagggccagagctgaggccagcctgcactggactcagggggtgccggggtcccgggcctcctccctccacccagggccccactcactctccagatacttctgcaccaacaggtcagggtcactctcccccatcagctgggacagtttattcagggcgtcctcgtagcaaagcaccagcctctcctgggaggtcttccagacgccctcggccacctccccggctaggggaagagagaacagcaggtcggcctcctgggtggcctccaacacagagacctcctgggtgagggggagcgaagtgtggtcccacctggggcacgaaggtgtgctgcaggtgccccaggggcggccaggcccttgagatgcaaaggcagcagccccagcctcaccctgcttttcacgcttctccaggacatcgggatccggctgccggtcgttgttcttgagcttgaggaagtggtgcagctgctccaggtgcaagatctgccgctgcaggacctgcgcctccatctcgctctgggcctcctctttctccgcgcgctcccgcagcaagcccatcttggccttcgcctcctccctgcgggggtcagccggggtcaggatgactggaggctggactggggtcggcctggggtcctggggatgggcggggtcagccagaggttgtggggggtgaggtggagtcagctggtgtcccagatgggcagggccagcctggggtcacaggaatggggctgaatcaggttgcagttatcctgtggtcacaaaaagcagagaactggctgggcacggtggctcaggctgtaatcccagcactttgggaggcaggaggatcacctgcagtcaggagtttgaaaccagcctggccaacatggtgaaactccatctctactaaaaatacaaaaattagccagacctggtggtgcatgcctgtaatcccaactacttgggaggctgaggcaagagaatcgcttgaacctgggaggtgaagattgcagtgagctgagatcgcaccactgcactccagcctgggtggcaagagcgaaactgtctcaaaaaaaaaaaaaagacagaagcaagaacttcaaaagagtgcgacatcatattagaaacacaacacaaaactctcggtgtgctgctggctcacgttctttcagcagcctgctctcctcatccttcagagtgtactgtctctctctaggtaaactctctgttctctatttgccttcagtaaattctctttgttggctaaatcagtctcttggcagaattctttctcccaagtaagactaaaaagcgaggattcctgtacttcccggtggcaggtagttttccttttggagtgatggaaatatttcagatctagacagaagtggtgcggttgcacggccccgtgaatgtactaaatgctgctacattctacgctttaaaatggtgaattttgccacgtttgttttaacagagagagagaaagagagaaatcacagagaccctaaggccgacccaggccacagctgatgtcgatcagggaccatgagaaaacagaagccagagaagaacttagtagaaggtaagaaagcatttggagcaaaagaagagggcgaagctgagaaagagacagggatggagtgagagagagagcatggagctcatgagagccccagagagggagagagaagccaacacctaaagcagcttcagctcctcaactccttacagtgtgcctctatctgaaggtggcccgagaggatctctgtcccttgcaaccaatgctgacgaataacaaattcgccagatgcttccaggaaccctgctgcactatatatgtgctagatgcgctttttttttttttttctcctgagacggagtctcactctgttgcccaggctggaatgcagtggtgcaatctcggctcactgcaacctccgcccccagggctcaagcaatcctcccacctcagcctcccaagtagctgggaccacagacacccgccaccatgcccagctaagtttttatatttttggtagagatgggatttcaccatgttggccaggctggtctcgaactcctgagctcaagcaatctgcctgccttggcctcccaaagtgttgggattacaggcgtgagccacctcgcccagccagtagatacattcttatgtgctagatggggtcagtagaggttaatttacatgcccaagaaaaagaacagggccggtggggtgcaatggctcatgcctgtaatcccagcactttgggaggcagaggcgggtagatcatgagctcaggagttcaagaccagcctggtcaagatggtgaaaccccatctctactaaaaatacaaaaattagccagccacggtgccgggcacctgtaatcccagctactcgggaggctgaggcaggagaattgtttgaacctgggaggtagaggttgcagtgagccaagatagcgcaactgcactgtagcctgggcgacagagccagactctgtctcaaaaaaaaagacagaacaggaccttgccagtggaggtggggaactggtggcggggagagagaaaaaggggatattatgggagaaaaaataggttctgacgtgtttcatgagtcctgaaccttcccatcactgccttatggaaaggtgcgtcctgagtcatctgggtcccgccatcccaggatacccgcagtctctacctgacggcgtaggcagaggtggaggagaggataagggtgctgaccaggtgatgcaggtggtggatctcctgtggggggaggagaaaaaaatcagtgccacttcttacaaccccattgctcgaagtctttccttttggccccgtgcttctccaataaggagtaaagctcttgagccttccaaatgtggaccctcctcattagcgactgcccatgaaagggattttaaagaggtgtgaagtcaaattgataagctggatcaaaaggctctttctgtagataagcagaaactaagaaaatatttagtaacctacggggactgggtggaaatgaggtggaggagatggagaggaaatgacgtttccctaggagaccttttggaatagtttgatttgagaaccttgttaatgttttacatattcataaaggaaattaaatcaataaagagaggagagaaaactaaaactgaatgcaaatggaagcaagtgaactttatttaaaaataataatagggccaggtgcggtggctcaggcccataatcccagcagtttgggaggacgaggcgggcagatcacctgagcttgggagttcgagaccagcctggccaacatagagaaactccatctctattaaaaatacaaaattagggccaggcgcggtggctcacgactgtaatcccagcactttgggaggccaagacgggaggatcacctgaggtcgggagtttgagaccagcctgaccaacatggagaaaccctgtctctactaaaaatacaaaaaattaaccaggcgtggtggtgcatgcctgtaatcccagctacttgggacaatgaggcagaagaatagcttgaatccgggaggcggaggttgtggtgagccgagatcgtgccattgcaccctagcctgggcaacaagagtgagactccatctcaaaagaaaaaaaaaaagaaagaaagaaagaaagaaagatgaaatgaggaatgctcaggaaaaagctggtgatattggaatggaatcagaggtatcaatgtgaactcactattgtaaaatatgtcagccaggcgcagtggctcatgcctgtaatcccaatactttgtgaggccaaggcaggagaatcacctgagcccaagagtttgagagcagcctggacaacatagtaagaccccatctctacaaaacataaatagaattttaaaacatataaaatatgtgtgcttcctagctctctccagaggaagggcctcaaagcaatgacacccaagtagcaacagagtctcttagtgccag[248 bp omitted]ctttagcctgggtgacaaagcgagactccgtctcaaaaaaaaaaaaaaaaagaaaacggtctcttagtgcctcaacacctactcttccctagaaagaaccgggactcctcagaaaaatggccaaccccagggatggggcagaacaaggtccagattacccagactatcttcgtgtgccagaaagtgaggaagtactcccaaaaagtgatggggtatgtccaaaggccacagaagccagcttgaaggggctcccactaaccaaatctggggcaatttgaatattaaaatgaatggcagttacggatcatcatctataaagtcagaatacactaatgctcactgacaacactcaaatatacagggggagaaagagaagtgtttcctttttgctttttttttttttgagacagagtttcactcttgttgcccaggctggagtgcaatggcacaatcttggctcactgcagcctccagctccctggttcaagtgattctcctgcctcagcctcccaagtagctgggattacaggcgtgcaccaccacacctggctaattttttgtatttttagtagaaacggggtttcaccatgttagccaggctggtctcgaactcctgacctcaggtgatccgcctgcctcagcctcccaaagtgctggaattacaggcatgagccaccacacccagccgagaagtgtttccttaaggaaaatgcgatcttataaatgtgggagaaatgacagagtcttttaaattaccctgttgcagccattacagtaataaccattcagggaagaatcattcatggatgataaaattgatggcagtagctgctggctgtggctgcacactccatggagccggtaggagccctgacccttctgagttgggatgggagctccccgtgtgcagctgcagccaccagaaccacagctgcagacccaggccttctgctccacagagcaggcaggatccccgccctcctgggcgggactacagctgcccaaactgctgctgtggatctgagcctctctgtgctcttgcagggagccaggagcaggcaggatctgccctcccgggtgcagctgcagctgcccaacccgcagctacagacccgggcctcccactccagggagcaggcagcagccggggacaagcgagggtcctgccccttccgagttggtggggtgggagctcccagagtgcagctgcagccaccctcccaaccacaggacctaggcatctctgaagttctctgcagcctgtaccctgaacggcccaggaaagcaccaccgcacccccctccccaccccgatccctgcaggctcgagcgtgtctgctcctgctgcttggcctctctcctctctcacacccactctgatctcagagaggggttggggtccagcccagtgccatgaatggcagcaggaggcaggcagattcctgggcagaagagggcaagtacccggtaaggtccctccttcaagccagggagggcctgaaggctgggggccaggttgccagtactgcaaaatgagtggggacttgcaacgtctcctccaggcctgcccatggccacccatggagctaccctctctgctgagagcttcagaggcctgcagagacatctgaacaatctgcctgcggagaggaaccaccctctccagggcctcctcactgctgatagctgaacactggacgagacgacctgcctgcagaggagctgccccctgcaggtctcctctgagctgtcctaacactcggtaaagctcctcttcatcttgctcacgctccacttgtctgcctacctccttcttcctggacacagtacaagaactcgggcaaaggcaccactggccaaggaggtttccagccagaaaagtgacgccgtaaatatcccgtaacaaaatgattgagtgaaggtgtgtcaggggacaagatatttacacagtctcagagaatctccccacagaccacttattcactacaaaaaggaaaactcttcctggctagccaagtgatcaaagacaacatcactagtcatgggacaagttgacatcaggtgcctcctgagatcttgcacaggaaggacacactatcactgctgtgacattccccccaaagtgcagatgccaagtctaatcatgaagaaagatcagataaaccggccgggcgtggtggctcatgcctgtaatcccagaactttgggaggctgaggcgggtggaacaccttaggtcaggagtttgagatcagcctgaccaacatggagaaaccctgtctctactaaaaatacaaaattagccgggcatggtggtgcatgcctgtaatcccagctactcaggaggctgaggcaggagaatcacttgaacccgggaggtggaggttgcagcgagccaagatcacgccattacactccagcctgggcaacaagagtgaaacttagtatcaaaaaagaaaaaaaagaccagataaacccatgtcaggggacatcgcacaacacaaacggcctggatgcttccaaaatgtcaacgtcatggagaaaaaaaagcccaagggactgacccagatgaacagagccagaacaaccaaatgcaacgtgagattctggaccggagcctagagtaggaaaatcaagttcactgtaaaggacatcactgggacaatcagtgaccttgacatatggacggtttagaattctaacaatgttaacctccctgacttggataacagcactgtgtttatgtaaggaaatggcgttgttcttaggaaatgctctctcaagtacttaggagcataatgtctacaacatattgtcaaacagttcagcattcaggataataaattattctcagcaaaacaataattacacacaccaatagtaagagtgggggagaaagagaaaataaatgtggcaaattatcaaactgggtgaaagatatataggagttctttgtataattcttgcacctttttctgtaatttgaaattatttccaaatgaaagtcaagaccggacgcagtggctcacgcctctaatcccagcactttgggaggccgaggcaggcgaattgcctgagctcaggaattcaagactagcctgggca[185 bp omitted]gtggcaggcccctgtagtcccagctactcgggaggctgatacaggagaattgcttgaatctgggaggcacaggctgtagtgagccaagatcacttcactgtgctccagcctggacgacagagtgagactcatctcaaaacaaagaaagaaagaaagtcaaaagagaggggacagggctggttcttcaaagatccccgtggaatgtataataaatggtcttgcttgctcatagattgccctgggtgatactattcagaatgacattctgctttctacaactataaatgaggccacttttttgttggaaatgtcctccaacatttcccaggcctccatgccttttggactaaagcaagcctaccgctctagtcaatcccatacttgaggcctgagtgctagagcaggaagggcaaacagctgtggggaggacctgcgcaggggtccctgtctcctcccctggatttcagggccactgaccttcttcagcttgcggtccacgttcagatagcggttcctgtcgatccgcagcagatccagctcctcccgcagggccgcattccgtaccagctggttgtcaaagtgacaggtgacctgggagtagaaaggtggatggaagagtgggtctgaagccaagtctgcctgcctcctccaagctcagccaaggaggagacacttatcagaggttgggccggcctgtttcctgagaaacagaggttctttggggttcccgaaatcaatgtccactcccctctaaggacccatcattctcctttccttgggaacctccatccctccagaatcctgtgtcctgacacatatgtgcacacactgcccagcatttccagaatccaatgaccatgcccagttcttcccataaccgcacaattcaggtcgagggaccaggagtttgaccctcaccctgtccaactggttttctaggatcctgatccttcgcctgatcttgaccttctgatccaggatgaatcccggggacctgacattcttactgtgggtaaagatccgcgtctcccactcctggatctacaagaaagaggatggtacctgtttttggttgcctgaatgtgggagagattgaatggcccagggaaaatgagtcactaagcatggcaaacatctgctgtccctgtcaccccagaataacatctacccttctgctgacactatccagccctccatgtggttctggtgggccttccaaccacagtgtatcaccctatcagccacatgacccaggtctggacactcacagggattggcctagagatg[132 bp omitted]caacctccacctcccaggctcgagcaattctagtgcctcaacctcccgagtagctgggattacaggcacgtaccaccacacccagctaatttttgtatttttagtagagatggggtttcaccatgttggccaggctgatcttgaactcctgacctcaagtgatccacccgccttggcctcccaaagtgctgggattacaggcaagagccactgcacccggccctgactcctttcctgatagtctgggggaagcacatgagatggaaggatgggattccaggacttctcctgtcatggccccaccacagggagggtcctgggagaatgaggccagtggacagaagtggagatgagagtcggagagacggtgagaatgaacttgatgacattagtagccctgggtctgcttatgcctaagaccagcttccaatctgtcctcatttctgtattcatctgtacttattggggtgtgctctgtctctcccagcaaactgggggttccatgaggacacagagtcttgtgttttctccctgtccgagacaaagaaggtattcaacataacatgcagactaaatagataaatgaattgctcaacacttcaatttgtgctctgttatgggttgaatcatgtcccataaaaactcatatgttggccgggcacggtggctcacacctgtaatcccagcactctgggaggcagaggtgggtgaatcagctgaggtcaggagttcaagaccaccctggccaacatggcgaaaccccacctctactaaaatacaaaaattagcaaggcgtggtggcaggcacctgtaatcccagctactcgggaggctgaggcaggagaattgcttgaacccaggaggagaggttgcagtgagctgagattgtgccactgcactccagcctggggaacagaacaagactccatctcaaaaaaaaaaaaaaaaaaaaccaaaaaaaaacctcacatgttgaagtcttaacccccagtactttagaatgtgaccttatttggagacagagtcttcatagaagtaattaaaatgaggtaattaaggtgggccctaatccactacgacgaggtgttcttagaaaaatgggaaattgctgggtgtggtggctcatgcctgtaatcccaatactttggaaggctgaggcaggatgatctctcgaagccaggagttcaagaccagcctgggccacaaagcaagaccccatctctacaagatacaaaataaattagctgggcatggtggtgcacacctgtagtcctagctacttgggaagctgaggtggcagatcccttgagacaaggagctcgaagctgcagtgagctgtgattgagccactgtactccagcctgggtgacagagggagatcctgtctcaaaacaaaacaaaacaaaaaaggaaatttggacatagatacgcacacagggagaatgccacgtaaggataaagacagaggtcaggtgtggtggctcacgcctgtaatcccaacactttcggaggctgagatgggtggataacttgaggtcaggagttcgagaccagcctggccaacatggcgaaaccccatctctactaaacatacaaaaattagccaggtgtggtggcacatgcctgtaatcccagctacttgggaggctgaggcaggagaatcgcttgaacccagggggtggaggctgcagtgagctgagagattgggtgacatgtctacaagccaaagtacccaagactgccagcaaaccggcagaagcagagagagagaggcatggaacagacagattctcccccacactgctcagaaggaaccaaacctgcctacatcttgatcttggacttctggcctttggaactatgagaaaacatatttttgttatacgagccacccaatttgtggaactttgtcatagcagccctaacaaactaatccacgtaccaaagataccccagaaggctgcagcaaacttaagactcagcatgaggatgttttaaatttttgaggaagaccttgatattggtcagataccacatgaactgctagcttaaggcagttcacaagttcaacatgagagggcgctatcatccttttgaagatgtcacatctttgtgagactggattttcagcagttgctgcaataaaagccaaatacccaattgttggtgggcgcagtgtctcacgcctgtaatcccagcactttgagaggccgaggcgagtggatcacctgaggtcaggagtttgagaccagcctggccaaaatggtgaaaccccatctctactaaaaatacaaaaattagctgggcgtaatggcacgtgactgtaatcccagctactcgggtggctgaagcacgagaatcacttgagcctggcctgggaggtggaggctgcaatgagccgagattgcaccactgcactccagcctgggtgactgagcgagactccacctcaaaaaagaaaagaaaaagaaatgtccaaaatgttgacactgggggaaaatgcagcaaagtgtacaagggatgtctctgcattatttctttcaactgcacatgaatcccaacaaaattttctttctttcttttattttttcttttttttagagacagggtctcactctgtcacccaggccgagtgcagtggcaccatcatagctcactgcagcctccacctcccaggccaggctcaagcaatcctcctgcctcagtaattgctttatgaaagaagag[138 bp omitted]catggcgaaaccccgtctctactaaaaatacaaaattagccaggcatcgtggcaggcacccgtagtcccaactacccaggaggctgaggcagaagagttgcttgaacccaggaggtggagattgcagtgagctgagactgcgccactgcactccagcctgggtgacagagcgagactccatctctaaataaataaataaactgtgtaattgttatgttttgacataaaatagtgaaaatatccatcgcccctaaaagtttcctcatgcccttttgtatttcctcacctcatcctcttcctgcagtcgagtctccccccagcaatcactcatctgttttctgtcactatagattggtttgattttctagaattttatattaatggaattgtatagtaaggactcttttggggatcaaaggggtatctggtttctttcactcagagtagttattttgagattcacccatgttgtgtgtatcaatagccggttccttttattcatgagtcacattccattccatgtatagaccacaatttgctcgtccactcgaccaccgatggacatttgggttgtttcagttttcgattttacaaatcaagttgggttgttatgaatattcatgtacaattcattatatggacatgtgctttctttcctcttggctaaacatctaggagtggaatgtctgaatcatattgtcaagtatacgttttgttttttggcaactgccaaactgggccaggcacggtggcccacacctgtaatcccagcactttggaaggccgaggcaggtggatcacttgaggtcaggagttcaagaccagcctggccaacatagtgaaaccccccatctctactaaaaatataaaaattagctgggagtggtggcacacacctgtaatcccagctactcaggaggctgagacaggagaatgtttgaacccaggagacagaggttgcagtgagttgacattgtgccattgcactccagcctgggtgacagagcgagacttcgtcaaaaaaaaaaaaacaaacctgcctaactgtgcaaactgtgtaccaaaagtagtgtgccattccacattcccaccagtggagtatgagagttctgcttcctctacatccttcccgcaacacttggtatggaccgtctttttaatggagtttgggaaagttcttaatatattctggatacaagttctctatcagatacgtgctttgcagatattttctcccagtctggaccttgtcttttcattccttgcctttgccagtttctgcagatgggattccttgacttggggactccttacctgtggccgcatcactggtttttgttttttaaaggggttccgagccaggcacaatggctcacgcttgtaaccccagcactttgggaggccacggtgagtggatcacctgaggccacgagtttgagaccagcctggccaacatggcaaaacctcatctctaccaaaaaatacaaaaatgagctgggcttggtggcacgtgcctgtaatcccagctactcaggaggctgaggcaggaggatcgcttgaacctgggaggtggaggttgcagtgagccaagatcctgccagccactgcactccagcctgggtgacagagcgagactttgtcttgaaaagaaaaagaaagtgggtctctctctgttgcccaggctggagtgcaacggggcaatcacagctcactgaagcctcaaactcctgggctcaagtagctctgccccctcagcctcaagacacgcaccactgtgcccaactgacaaattggttttttcaatgaaggctagaccagaatttagcagaatgaatcccacattaaaaaatgtatatatatatatatattatttgctgaaacttctgtttcagatatattaatatatgtgtgtgtgtatatctgtatgcatcttggtgtgtatgaactacacctcatgagtcatggtcataaaaacttgacagatcactggcctagaaaaatcacattgtttgcaaggtcaaatagcaaggtcccaaaacagatgggattcgcaacctgtctagactgtggcattaccaccgtccttgtttgcagatgaagaaactagggcccagagaggggaaaacctgcctgcccccgatcacagagctccgatggcagagccaggactctaatgcaggttttggggactctaacatgcgaacctttcctgcttaaccacaccagtcctgtttttgaatgcctgggactgtgctaaagcagcaaacatctatgtttccactgaacacaactctaccagatggatgctttcaatagccccgatttttttttttttttgagacagagtcttgctctgtcaaccaggctggagtgcagcggcgcgatcttggctcactgaaacctctgccccccgggtttaaacgattctcctggccgagcacagtggctcacgcctgtaatctcagcactttgggaggccgaggtgggcggatcacaaggtcaggagatcaagaccatcttggctaacacagtaaaatcctgtctctactaaaaatacaaaaaaagtagccaggcctggtggtgggcacctgtagtcccagctactcgggaagctgaggcaggagaatagcatgaacctgggaggcgaagcttgcagtgagccgagattgtgccaatgcactccagcctgggcgacagagcaagactccgtctcaaaaacaaaacaaaagaaaaactattctcctgcttcagcctctcgagtagctgggattacaggcatgtgccaccatgcctggctaatttttgtattttttgtagagatggggtttcaccacgttggccaggctggtcttgaactcctgacctcaagtgatctgcccgcctcagcctcccaatgtgctgggattacaggcatgagccactgtgcccggcctaatagccccaatttcacatgaggaagctaaggctcagggaggttacaacacttgcccgtaagcaggatccgtagaaccacctctcaaaccccacctgcttgtccagggccctggtctgctcctgcagctcctcgatctccgcctgcacctgggcccggcccttcagcaggcggtccatgttctccagccgctgactgtcccgaagccgcttgacctggttctgggctgcgctgatctgcacctggagatcgccccgtacctcctccaagcgccggatctcctcactacccaggcagggaggtggaagaggggccagtaagggggcagaactcagcatcactaaaggcaggacccaggagtccagtcttcagcccctctgaccccctcctccccagctcagggcccaggcgcccagctcacagttgcttgttgatgcgctggtggacttccttgctgtaggcccgcctctccccttccatcactttgcattgtcgctgcagcctactcagctcccaatccactgagaacagggccagccaagggactcagcagggatcctggccaccagctcctcccaacccaggacctaggaattctgctccctttggggtctcacaaactgcaactgaactgcagatccagcccccaacacccctctaggaatgcacctcagttccgggatccctcgagcttcctcatcccttcatacccaaaactgaactcagggtttttttcccctaaaacccactcccatcccaccagagggcacttctggaaggcctctgggtcttctgggacctgggcacaccacctggaattgggaaggctcttgctccctccctccttttctgccccaccatcagcagccctcagccccatcctcttgcctcctccctctctcaacccatcccctgggctcagcctcatcctctcctacctggaccatcaccccaacctttctctcaacttccagccttcctgcacagtcccagagggtctctctacacccacagccaaccctaccccacccacagcagaccctacccctcataggcctcccatgatgccccagtacctgcaggacaaagtctcagcacctcagcctgggatcccagaccccaagtgacctgaccttacccacctctccagtcttgcccgtatgctccccatctccaaaggcccagtagttttcaatcagcgggtgattctgccttccaaaaacatttggcaatgtctggagacttatttttttctagacagggtctcgctctgtcccccaggctctagcgcagtggcacaatctcagctcactgcagcctccacctcgcaggctcaagtgatccgcccacctcagcctcccgagtagctgggattatgggtgcacgccatcacacctggctaattttattttatttttgtagagatgaggtctcactgtgttgctcaggctggtcttgaactcctgggctcaagtgatcctccttcctcagcttcccaaagtgctgggattacaggcatgagccagcatgctcagcctagagacatttgtcattgtcatgacttgtggagaagggagggggctactggtatccagtgagtagaagccatggacactgcttggcatcctacgacacacaggactgcccccacaacaaagaattatcccaccccaagagtcaacagtaccaaggttgagaaagcctactctagccacattctgtcatctctgtagaaacacccttccttccttctccccttggcaattcctacagggagttctgggccccactcaaacttctgctgcctgaagtctccagcctgccccactgcccaggcttggcccacccaccgtggtgcccgccccgcctcccttagggcgcatgtctgttcccaccagagggcgctcctggacagacactctccctccctccctacaggacctggaacttgggaaagctgggggctggaaaagaatgggtgaatgatataaagaatgaatgaattacccattccctccagaaatgcctcgcttccctcctcggagcgggcgctccctgccaagcgtcccaaaggcatcctggccaaacagggtggggctcctgtagggatggacatataagacccttcagacagcaggcgggccagggcccagagagggtggacaatgaactgcgagggactgggaattgaaagggggtgaccctagaaccacgctggcctcattcctccaagaggggttggagggggacctctctcaggcctctcccacacctctccagccctcccacctctcacactctgggtcttgcgtctaggctccgattctggcgcgggtttggcaggggacaggcctcctgggctctcaggatatctgaggccaggctgtttggtcgcaggagagggggaaaccccggcctgctgtagtgggggttgggcagggtcgggggagtcctgggccctacctgccgacgggcctgacctgttcttggtgctccaagttcagtgttgtggtctggttactggggagataagggaccaatgaggactgaggacagcggccagggagggactgaggccgcgggagaaactatgggaggaggggcggagaaggatgcgaggcgtagacctgcagggttcccacggactgagaactgatgggcaaggccaggcgcggtggctcacgcctgcaatcccagcattttgggaggccgaggcgggcgcatcacttgaggtcacgagttcgagaccaacctggccaacatggtgaaaccccgtctctactaaaagtacaaaaaattagccggacatggcggctcgtgcctgtaatcccagctactcaggaggctggggc[138 bp omitted]cctgaaaggggcggagccgggagggcctgtggagcggtgctgcggagccctgagaggtgcacggctgtgaggcctgagaggggcgtgccgtagggagctgtgatgggcggggctgagacctgtgaggagagtgagtgggaagaacttcgaggggcggggcttcggggccggcgaggggaggggcacggacaccagtacaggacggggcttcgcagacagcgagcggaggggcttccccgtaaggggcgggcttcgagggtcgcgtttggaaggccttacgaggggcccggtggaagggcggtgaagggcgggctaatcgggaggcgctcaggccttgaaggcctgcgggaggtcgaaatggtcctggggaggtcgaggctgaggtctcactagtaccgcgggcctggaagcggcgggagttgaaagagcctgcggtgacctgtatggaagccctcgaagccaggccgaggtcctacaagacggagcccgagaggtgccggtcttaagctgactgtgaccacgttaaattaaggattcataggaaggaaggcggtgtcgaagccgggagttgcgcggagaaggagcgctcaacacagcctcagcggttcactacgcaagcgcgaccaacggcttcccgggaagcagccaaaaacgcttggccgcctaccacgtccgcgcgctggagggcggaagtgggtgagacctcgggcactccataccgccccccggtttctggccacgccccctctggttacacccactcgctctgtaaggcacgccccctccgcggcggcggctgctgcccacgtgggcctccccgggcgggcgggcagtgggcgcctctccctgcaggctgggtgtgcccgaagcctgcggtttcctgtgggaggaagcggcctgcgtacgctcagctcagctcataatctcggaggcccaggatggggagatcccgccgccaccctcagatcctttgattcttccccttctacatagccatagtgcggggacccccctaatatccccagggtacccaagcctggcgccgatcccactcagggaacttgattctgagtcctagactcgtgtttttcacctccccggctcaagtttccatcttcctagcccctggctccccctagtcctctcaagaaagtggagccctcttttcctgctccccaagaggaacgtatgtctccccagcccctaatttttccttcagtgacccagactttgcaacttccttagggatctgagtgcggaccccagtttctgtctctcaggcacttaagtttgagactacttattctcccccagggaccctcattttggattcccaactttagccttgagacccaatggacccaagaatttgccccttccccaactcctagagatcctgaatcagggtcccccagtactgactccactcagagccccaatgcctgatatgactagcactaccctaagaactgccctataatgtatttactattatctctatttttcagatgaagagactgaggcatagagaagttattagtaacttgccaaaaattacacagccattgagtaaaacagcttggattttgagtccaaccagtgtggctctagagtctgtgctatactggtattccagcttccaggtcttggggtacccagccaagcactgaactgtccatccctcaccccctcagggagcccgaatcaccaacagctatcccaaacccagctctggcccatcagatacccagacatcccatcatccagttcccttccctggatccaggatttgaattcccctgctctcaatttatcagagttctgggcacctggtcccctcccaagagactcgtgtacatagtagtcatcaccccgaccctaatttaatatccccaaaattaataataatagttaacagtaaacctttggggccaggcacagtgtcttacgcctgtaatcccatcattttgggaggccaaggcaggcagatcactggaggtcaggagttcgaggccagcctggccaacatggagaaacccccgtctctactaaaaatacaaaaattggctgggcgtggtggcgggcacctgtaatcccagctactcaggaggctgaggcaggagaatcgcttgaaccgggaggtggaggttgcagtgagctgagatcatgccactgcactccagcctggatgacagagcaagactccatctcaaaaaaaaaataaaaatctttggtactacactctgttaaaacctaatggctttccactgcacttagaatgaaatccaagcccctcccctagtcttcaagggcaccctttgatttcccttctcaccactccctctgtctccctgtgctccagccacactggcccttctgtctgctccctaaacaacctgagcttgttctcaaaagctttaagagcttttgcacttcctctccccccgacgcccccccaccactccccaaccccagcgttcaaatgactcctgtcttcagctcaaatgttacctcctccaagaggccttccctgattttcctgtttcaagtagtcttccctgcactctgtcattatctccatcactctgtttgatttattattgtatttatttttcttttcttcttttatttttttttttctttaagatggagtcttgctctgtcacccaggatggagtgcagtagcgtgatttcagcttactgcaacctccgcctcccgggttcaagcaattctcctgtctcagcctcctgagtagctgggttacaggcgcccactaccatgcctggctaatttttgtatttttagtagagacagggtttcaccatgttggccaggctggtcttgaactctcgacctcaggtgatcctccagccttggcctcccaaagtgctgagattacaggcatgagccaccacgtccagcctattgtatttatttttcaagtcacttatccttatctgagatttatcttcatcattgatgttttctcttgtctgtcttcctctactagaatacaagctccataataccagcagggctcatgtctgttttcattattaactcccagatcagagtacatgttcaataaatgtttgatgaaggaaggaacaggttaggtgtgtgagtgtgccagtattaccttattcattcagcataagtatcagaattattattatcagtattagtattttgtcagcattattatactctcaacatagactaagatactggagcccaggtgggtgaaataattggctcaaggtcactgaaccaggaaatgatggcgctgggattcttagcttccgcttcctccccgcttccagagtttcacaaggtttttttttttgtttgtttgttttttgttttgttttgttttttttttgcgacagaatctcactttgtcccccaggttggaaggcagtggtgcaaactcaactcactgcagcctccacctctcgcgttcaagcgattctcatggctcagcctcccaagtagctgggattacagtcgcccgccaccacgcccggctaatttttgtatttttgatagagacgggtttccac[140 bp omitted]ccacggggccaacttcaccagcccaatctcaagtccatgccacagaaatctggcctcttttcccagactcctatccagctccaagctccatcagggaaagcagacatccggccccagggcaagacctcaaaactcaagggtcctgagaatcgggccctcccacccctgacgcttgccccccccaagaaccccattccaagagtttctcatctcaaccctgggagggagccccagatgatgtctgtctggagggattgggtgggggcccaaagaaagaggaaccggagtgcctgggccctcccactggcagccgacctcagctgggtgcggtgagggtgggtttataaaagggtcagtatatattgagaggaggagagaaagagaaacgggagcaagagagaaggaggcccagacagtgagggcaggagggagagaagagacgcagaaggagagcgagcgagagagaaagggttctggattggaggggagagcaagggagggaggaaggcggtgagagaggcgggggcctcgggagggtgaaaggagggaggagaagggcggggcacggaggcccgagcgagggacaagactccgactccagctctgacttttttcgcggctctcggtaagtttccagtccgttattcagggctgggacttcttaatttacttgggaatgtagcagtttgggaaggacacccccaggctgggagagacgtccctgactcttggaaatccttttaatttaataagtgatctcttagcacttgaggtggggatatgggaaggggtggggcccggcaaagttttggggtcccagcagagccctccactggaaaacttcctgcagtttttccctcagcggtgtccactgtcctctggggtccctgagatcagggcattgcatgagaacaccccaaatctgggagacctctaggtcccctgttcctgggcaccaaagagtcctgggaggctaactccttcttgggcctctcttccccccagcgcgaatcctatccatttcctccagaagatgtccaacagtcaccagtctggcagcagggtggggtgaggacctcgtggacatagccaggggctggggtttccctggtgcttagagatgggggggggtggggatgagtcaccagatgactcaccaggtccccctcctcccctcaacccaggagaggagtggtgtgagtcaagaatgcctgttgctgggggcagctcctcaatcctgatgtcggggtgcagggtggggtctcaacttgaattttcactatctggcctgtatgtaacccagagtcagggttctggggagagaggagccacattgctagtcctcctcattcaaggaacccaagagtccatctttggccctctccacccctccagccaatggggatctcaggaatccaggccccagcggtctcctccctgagagacccaggagtctgcacccatgcccttcctccatcaggagacatctcacctgcctttatgccaaatttttttttttttttgagacggagtctttctctgtcacccaggctggagtgcaatggcatgatcttggctcattgcaacctttgcctcctggattccagtgattctcctgcctcagcctcccgagtagctgggattacaggtgtgcaccaccacacccagctaattttgtatttttagtagagatggggtttcaccatgttggccaggctggtctcgatctcctgacctcaggtgatcctcccgcctcggcctcccaaagtgctggggttataggcgtgagtgtgcctggcctgtgccaacctcttgagactccgtcccctgctccccctccccaggcttccactgcagccatgtcactcctcttgctggtggtctcagcccttcacatcctcattcttatactgcttttcgtggccactttggacaaggtaagcctacttggagctcagggcccttctgttcccctttggaatcttgccacgcccctcctctaaaggcattctggccccaccccctttacctagtatttcttttttattttatttcatttattttgagacaagggtctcactctgtcccccaggctggagtgcagtggtgcgatctcggctcactgcaacctcggcctcccgggttcaagcgattctcctgtctcagccccccaagtagctgggattagaggcacctgccaccaagcccggctaatttttttattttggtagagacggggtttcaccatgttgcccaggctggtctcgaacccctggcctcaagtgatccacctgcctcggcctcccacagtgctgggattacaggcatgaaccaccaggttaacccttttagctctacctccgatgcctcctccctgtcctgaccctaccccctctcatattaaatcctaactctccccagttctgccccatcccagataccctgcccttttcccagcccttcccacagtctgcctgaccctatcccctctcctttcctaaccctgccccttgtttcgttctctgtccatcccagtcctggtggactctccctgggaaagagtccctgaatctctggtacgactgcacgtggaacaacgacaccaaaacatgggcctgcagtaatgtcagcgagaatggtgaggggtgagggcggcgggactggtcttcaaaggggaaggtaaacccttcgtgtcctcatgggactgagaattgggaaccctcccccaacaaagttggagtgggcggggtccaggcctgagtggctgagtgcctagggctaatgcatgtcccgcctgtctggatgtacctacctcttgttttttttgtttttgttttttgagaccgagttttcctctggttgcccaggctggagtgcagtggcgcaatcttggctcactgcaacctctccctccggggtccgagcaattctcctgcctcagcctcccgagtagctgggactgcaggtgtgtgccaccacgcctggctaattttgcatttttagtagagacaggtttcaccatgttggccaggctggtcttgaacttctgacttcagctaatccacctgcttcagcctcccaaagtgctgagattacaggcgtgagccaccacatccagccagtacctcctgttctgaagaggccatatagataaaagcatgctataggtttaaagaatagagaggggaggccaa[133 bp omitted]gaggcagaagaatcgcttgaacccaggaggtggaggttgcagtgagctgagattgcactactgcactccagcctgggcaacagagcaagattctgtctcaaaaaaaaaaaaaaaaaaaaagaatagagaaaaatctcccaagattctgagaagacaagagtatttttccaaagctctaaggagatggggctggtgctctgaatggatgcctgggaccatttcatccaaattccaaggggatggggctgaaaccacttaaggttctaaaggggtggggccaggtgcattggagttctaaaggaatagagctgcatctatctaaagttctgtgtgaaagatttaatgcaaaactaagattaaaggaagtggtctgctctcaccacttctattcaaccttttactggagtagccaatgcaagaaggcaagaaaaagaaataaagggcatgggaaataaattaggaaaaagtgtctctattcccagtaaacatgttgtttatgtagaaaatccattaaaattctgcaaagcagacagacacagtggctcacacctgtaatcccagcaccttgggaggctgaggaggaaggatcacttaagcccaggagttcaagaccagcctggacaacatagggaaaccctgtctctacaaaaatttaaaaattacccaggttgtggtggcttgtgcctgtggtcccagctactcaggaggcaggggtgagagaatttcttgagccctgaaggacgaggctgcagtgagccatgattataccactgcactccagcttgggcaacagagcaagacctggtttcagaaaaaaaagaaaaaggaaattggcaaagcaactactagaactgagaagggaatatagcaaggtaacagggctcaaggtcaaaataagtgatacatctaagtatctaggcttgtatgggcctaaacgggagcagggatggggcagagaagggtcacatggtgagcaagcaggtgaagctggaactctggacccacggtgatgtccccctctgtgtcctccttactgcaggctggctgaaggcggtgcaggtcctcatggtgctctccctcattctctgctgtctctccttcatcctgttcatgttccagctctacaccatgcgacgaggaggtctcttctatgccaccggcctctgccagctttgcaccagtgagcactgcccctccccaaccctaatcccccaagaattgagcagaagggagtggggtgtgtcaagatgctgggggccctgagaatgggcctctcgtagaaaaaaacaactttcaacaccccacgagccacaagaggtgcctccgtgggctacatctctgcccccagggattgctgggacttgtagttttcagtggctaatgatagttatggcttgtgcgtatgagtcatcagggaactcagagtttcagggagccggggctggggaaggaggtataggtaaatagttttggtcccagggatcggccgtgacgtggggggataaactaattagtacctcagtagagagctctaaatcataataataatggtatttatatcagccaaccgctgtttcttgcgtgcctattgtgcatcagatacttcaagaagttttgcgtactttttaattttttgacttaaggtgcaaagggctaacttaatcacagtcagtttggggaacattataggttcttgcaaagcttctctcttggtttatgaatttactactgcatgtttggcttatagaaacacactcaaaaatattccttggatggatagagagatattattggacctagagagattaaatcagttacctaaggccgcgctacagttgcacggcgctgggcgggggggaaagaaccacaactcccagcaggcagcggcgctgcccacgggccctccggcgcttctttgcccccatgggatattgggaaatgtagtcttgagggggcactgcatgacgtgtggttttcatcttccgcaggcgtggcggtgtttactggcgccttgatctatgccattcacgccgaggagatcctggagaagcacccgcgagggggcagcttcggatactgcttcgccctggcctgggtggccttccccctcgccctggtcagcggcatcatctacatccacctacggaagcgggagtgagcgccccgcctcgctcggctgcccccgccccttcccggcccccctcgccgcgcgtcctccaaaaaataaaaccttaaccgcgggctctgccttgatcttccttccttccgcctccagggacccaggctgcgcacgcttgacctctcctgaacctaacatggtccccaccgccagctgctcagccctcagaatgcccatctcccagcccccaaccccttcctcccgaggacacaggagccgggaccccaggcaccttttccctcccacagacccaagagcctgggccttccccgctcaaggcccaagagacctctgtgaggcacctgaatctagaccttcagacacttctgggaagaacctggattctgggtcccagcagaccctgttaggataggaagcctgcagtgaccagtcctgtctccttgctcaagcttctgtcactctgttgctctctctctctgaaccccgggcatagtgtgtgtttctagattgtcggactctttttttctttctgtccaggttggagtgcagtggtacgatctcagctcactgcaacctccgcctcccgggttgaagcgattctcctgcctcagcctcccgagtagctgggactacaggcacgagccaccacacccggctagttctggactcttttttctttctactaactttccatttgggaagacagctttctttttccctctaggaaaccagtctccctctctctcttttttttttttttttttttttttgagacggagtctcgctctgtcacctaggctgtagtgcagtggtgcgatcttcactcactgcaacctccgcctcccgggttcaagcaattctcctgcctcagcctcctgagcagctgggattacaggcgcccaccaccacgtccggctaatttttgtatctttagtagacacggggtttcaccatgttggccaggctggtcttgaactcctgacctcaggtgatccacccacctcagcctcccaaagtgctgggattacaggcgggagccaccgcgcccagcccagtctccctctctagggactgaacatttggggtcctagagagggagacttcccctgtctccccaaaggctgcctctagcccatatgacacgttagcaaaaattaggaggcaccccttcttctggctgacccagccccacaccaggatacatgtaggggtatgggctgggtcttacagccacccacccgtggctgtgttcctttgtgcagttaacaatctgcacaggccgggtgcggtggctcacgcctgtaatcccagtactttgggaggctgaggcaggtggatcacctgaggtcaggagttcgagaccagcctggccaacatggtgaaaccccgtctctactgaaaatacaaaaaattagccaggcgcggtggcaggcgcctcccagctactcgggaggctgaggcaggagaatcacttgaacccaggaggcggaggttgcagtgagccaagatcatgccattgcattccagcctgggcaacaagcgcgaaactccatctcaagaacaaaaaaaaatctgcaaatctgcacaatcgcacatggctacgctatctcctctgttcatcaggccctgggactcctctggaatcagatccttctaagatcctcttctatgactgtctttgtttcaccgaccatgaacccagcctctttttaggactacagctttctctgtctgggaccccaagacctagctagagtccctcccctctttccaggattcaaatgctttccttccctccaactcctgcagccatcccactcatctagatttttaaaaataattttttaaccactcctacagagcagggttaccctaaaggcagtgcgttaagagtagcctcatccagacttattaaacatgatttattactttgggacaggagacgggagaaattgatagaccaataaatattgcacaggctgctggtggtggggagatccagaccgaggtagtttctgtagaaagggtgaaagacctgggcgaggaaggcacctgaggttgccgggagccaggttgggagcgagtcttggtggcgagggtggtttctggttcacctacctagcacaaggtctccaactccttcagcctagacaccctgatcagcagctgaccagttggcctgccatttaagcagcagcaattgatagcaagatcaggtttcctttagaaattcttattggttccttccctgcagcgacaaccggctgcccaaagttgatggaacccagcagctgtcactggacgtttgccaggaggcagggctaacggccttggtgcacatgatgggcagtttgcccggagcgggctgaaaaagacaatgatatatagtctcgggagggcgcagctttaactcttctacctggcggtttacagaagccagagctgagcagctgtgattggcagacaccctcagctcctcagccaaaccacacttggatgtttatggtgagggtgggactaagaaatggaacagaagcagagctaaatcgctttgattggctgttcatcgaaggggcggggaagacttaacaactgctagctgctttgattggctgctttgcttaagcacacagtgcagcaaaaataatcacctgtcagttattggaagttggagtgaaaagtataataaccgtaattgacagcctgtcgtgaaggaggcggggcttagttcctagcctgctgactgggcagggaggtaggttctactcaggagatgttactgctgggcgtggcttgcgggggctcggaagtgatcggagccactgggtctagtttggggaaacccgggggtgggtacaatcccatgctgggggtcagggcctgcagatgcgccagggcccgagttccgttgaaggtcacctcacagcctgacttggctaggagccagttctccacctccgaccggagccacctggaggtctctgcaaggggagaggcaggtgttctgaggtcacactgagatcggggaagattcgagggagcagcaaggaggggcgtagggcaaagaacaggaagggcctgggtttgggagaagcctaggagtgatcttgaggcttggaggggagcggaacaaggcccaggagggtcgagagggccagaaggcccagctctggggctttcgtctggggaccagtcaggggctcttgggcagggaaggtgggggctcctgtaggcaaggggaccacctggagcccacacagggagcgcgcaggatctcttgtagggagagtgtcagctcaggtagaggaaagaatgacaggagggggccgtgccatggagccaagactcccaaccaggctgaggttaagaaagggctgtcacatcaggcaccaagatcggagtctggattcggaggtcctgtctgctgagggccggggtctcttcgcaaacccgtcaggttcacccgtgggaactgggggtggggacgcatctcgctggggcggggcctcgcgggggtgtggcccctgggggcagggtcccagggccacgtcctaccttcgggcgagccttgagtgccccctggccgccgggccaggaagctgtgagccagcagcgcctccttggtgtgctcgtcctgcgcgcgcagggccagggcgctgagcagctccgagttgttggacgtactgcgatagtacagcatgtgcgccagctccaacgcctgcgcgctgcgccgctgcccgaacatctgcaggcgggacagcgccccgtgggctcagttcggggtgcgcccccacccatacacagcccccggggtcacccccgctggcacggcccacgccgcttactcccctgaggaggcggggaggtcctacccagacctcttcagtacgggtccccagagctcagtcgagggatctatttggggatttttggggtctgtcttttctttttctttctttttctctctttctttctttctttctttctttctttctttctttctttctttctttctttctttctttctttttctttctttctttcgttctttctttcttttctttctttctctttctttcttttcttttctttctttctttttcttccttccttcctttctttcttttctttcctttttttttttttttcgacagggtctcgccctgtagcccagtctggagttcagtggctattcacaggcaaactcataacgcactgaagctttgaactcccgggctcaagcgatcctcccgccttggcctcctaagtagctgggactacaggtgtgcgccaccaagcccgatattttttgtagagacgggattctccctgtgttgaccaggctggtctcaaactcccagcctggagtgatcctcgctcctcagcctcccatagtgctggggttacaggcgtgacccaaggcaccggctggggatctgtatttttaacacacgtgccctcattccagtggctccaagaccaccagccccatctggcctacagttttcagcaaccactgcactggtttgctcatctgagccatgtattaatggatttacccaaaggtttgcagatgataggagttttagctttgaaagattttgttacaatacatccttatgttttagagacataataaagtatttccaaataagtctaggtaggatttacttcaaaatcatccaatagtaggacagtggaggtcttcaggggaaatctgattaactattgctaattgttgatgctaggtgctggctagtggagtttatcatactatcctatttctgtgtttgtttgaacttttctataatgaaggaaaaaatggtttaaaatattaaactgtaggccaagtgcagtggctcaggcctgtaatcccaacgctgagaggccaaggtgggtggatcacctgagcccaggagttcaagaccagcttgggcaacatggcaaaagc[137 bp omitted]atggagaaacccgtctctactaaaaatacaaaattagccgggcatggtggctcatgcctgtaatcccagctacccgggaggctgaggcaggagaatcgcttgaacctgggaagcagaggttgcagtgagccgagatcatgccattgcactccagcctgggcaacaagaatgaaactctgcctcaaaaaataataataataataattagctgggtgtgatggtgagcacctgtagtcccagctactcatgaggctgaagcaggagaatcacctgaacccaggaggctgaggctacagtgagccatgatcataccactgcactccaggctgggcaacagagtgagaccctgtctcaaaaaaagaaaaaagttaaattgtaaagagaagaggagaggggaaggatgttggggggaagaacaggtctgggcccagctgtctactggctgcccacttccccaccgttagtctctttgcttggacccctcttctcatccttgatattggtaaggagaaatgagggcatcagtgccctctgggctcccactgaaaaactgtgcccaggccagatgcagtggctgacacctgtaatccctgcactttgggaggatgaggagggcagatcacttgaggttaggagttcgagaccaacctgggcaacatggtgaaaccccatctctactaaaaatacaaaaattagacctggcacggtggttcatgcctgtaattctagcactttgggaggccgagacgggcagatcacttgaggtcaggagttcgaaaccagcctggccaacatggtgaaaccttgtctctactaaaaatacaaaaaaaaaaaattagtcaggtatggtgacaggcacctgtaatcccagctacttgggaggctgaggcaggagagtcgcttgagcccgggaagtggaggttgcagtgagccaggattgcgccactgcactccagcctgggcaacagagtgggactctgtctcaaaaaaataaataaataaaaatacaaaaattagtcaggtgtgtgtcatgtgcctgtaattcccgctactcaggaggctgaggcaagagaatctcttgaacccgggaggcagaagttgcagtgagccgagatcgtgccacggcactttagcctg[203 bp omitted]cgtggtggtgggtgcctgtagtcccagctactcaggaggctgaggcaggagaatggcgtgaacctgggaggcggagcttgcagtgagctgagatcgcaccactgcactccagcctgggtgacagagcaagactcagtctcacaaaaaaaaaaaagaaaaaagaaaaaaaagaaaacctgtacctgtacccagattcctccattcagccacaaaatgagctcagggccactggaccctgtagctggcaggcctggctgcctgacccactaaacccttaccggctgcccctggtaagacctaagtcctcagtcagcactgtctgtacaacaatgccaatgccaggg[224 bp omitted]aggcaggagaatggcttgaacccaggaggcagaggttgcagtgagctgaggttgcaccactgcactccagcctgggggacagagcgagactccatctcaaaaaaagaagaaaaaaaaaaaacattgggacaaagcctggcccctcagaaacacttaccaaacatcagctactatggaacagtcacccacaccctgtgctgggtgcccatagggtgttcccatctcacaccgaggcctgaggtgaaatgcctctcaagtcagcgcaccccagaaaatcgctgaaatggcctgcaaggtaccaatgacacgcttgcatgtggactgtaccctcttctcaccaggccagcacagtcagtttaggtgcctgcattggaacgaatcgccatttcttcggttgagggcaagatgcaggaatagcatgcgttagggaccgtgtggtatgaaaaacacattgggtttgtgtcagtatctgccaagccgatggagctgaattctagttaaaggagcaggtcactctgtggcacacagatgaagccagagtctccctggagaggggtccccctgccacccggagggtcccttcagcactaccgctgcccacaaggaatacagcactcgctcctcctaccctggggtctatgtcttgggcagcccctccacctactcagtcacaggccaggcccctggcaccatccttgctcccccttcgccaacctgtcagtcccaaccccattctgcagtcccctgactctctctgcccgtctcctcctctgcagctccccagctcatccttggctcagactttatccccgcctgcatcactccagcctcctccctggcctcagtctccccgtccagtttgtctgcacataggttcagagctgcccctgcccctcccctgctcatggtcctcccatggctccccagtgctctcagagtccaagctccgtggcccggcacacgaggccctccctgtcacctcctgctcctcccctgtgaatgcagcgcatgctgaaaaagccggtttaccctgaacaggtcctgctctctcaggcctccaggcccaggcacaagccaaaccacccctggtgtgttcttggaaaatgttcactgcctcatcctcaaggctcaggatggacatcacctctcgcggacgagcagatgcagcctcgggctcctgctgtgccagctgccgcctccattacagaccgactgcctgtgtccagggaccccacacctctccctccagggcaggatcgggctgctgcatctcaggggcaccagttcaacatccctccccaggctgccccatgggcctgcttggtgctgggctaaggggcttcacagtagagcccagggtatggaggaacccacaggggcaccaccccagcctgggacatccgggaaggcttcccagagcaggcagcctctgagctgagggtgaggggtgagcaggggttggccagcccaacaagaggaaagggcatttcagtccaagggaacagcacaggcaaaggcagagaacgagggatggcagggtgggggcgccgcaagcatgcaggaggagctgaggcgcagattcgaggggaaggattgtgtccagtgaggctgggaagcagggtccctggtgccaggctgtgcccagaggaggggcagggcaggactgggtagaatggggaatgggctggaagggaccaactggaggctgggaagagggcctgagcagggggcacagaggtgggacaggaagggtgggctgggggtctagccagtgactggcgggatgacaggtcatccttagatgcggagcccagaagagaagatgtcaggggagacgctgtgcttggcctacagtgagagtgagggccccagccgggaggctgagcctggagcttcttggttgatctgatcatggacagtagagagctcctgtggaaaccacagaagcagagcagccctgtgtcttggaagaaagagggccccatactccgcatcccgcaccttgctccccgcaccccttatcccgcagtggggctctgagtgcctgttccaaggtgagatggggaacttgagaggagcaggagggttgaggcagctggactctgggctcatggggacacgctgcacatgggcttgggtgtgtccagggaacaggagaagccagattaggggactaggggaggggcttgcaatgaagacagagatctgggagcaactgaagcgcaggaggggaccagccaggagggagtctgggagggccaactgtttttttgtttctttgtttgtttgtttgtgttgggatgggagtctcgctctgtcaccgaggctggaatgcagtggcgcaatctcagctcactgcaacctccacctcccgagttcaagtgattctcctgcctcagcctctcaagtagctgggatttcaggcatgcgccaccacgcctggctaatttttgtatttttagtagagatggggtttcactacgttggccaggctggtctcgaactcctgactgcatgtgatctgcctgcctcagcctcccaaagtgctgggattacaggtatgagccactgcacccagccaagggcccacatgtaaaggctgggcctcaccccaaggcgtggggaaatacctcatgaattcatgaatacactaaattaacttgtcaactgggatttttttttttttttttttttttgagatggagtctcactgtgtcgcccaggctggaatacagtgatgccatctcagctcactgcaacctctgccccctgggttcaagtgattctcctgcctcagcctccagagtagctgggattacaggcatgtgccaccatgcccagctaatttttg[150 bp omitted]tttggggtttcactatgttgcccaggctggactcccaactcctgggctcaagcgatcctcccaccttggcctcctgagtagctaggactacaggcatgtgccaccatgcctggtgtgaattgggtttgaaatagggtctttcagagcctgacaggctccatagcaccccaagggccagcaaggggtgaggcaatagtcaccgtgggctgggactcagtgtcttctccccagaggcaccgggcctccctgcctctcatctcgcccctcccctctgccctccatggttgcagcttacagccattccacagctccctgcggctctgaggataaggccttgggtaccactctgggcattcaaggccctcaccaccctctgggacttcccctctctaccctgctcactggatccagccccatgagatacgccaggctgagctcgtgggctctttctccaccaggctcaattcctgtcttccagagctttcctcagatcctacctgagccctggtcccaagcagaaattgctccctccccagcccctctgttggcccaagtatgccagcaccctctcaggcggcacagcctggctattatctgcgggatttattaccagccttcctaagagcctgtcagcatggctgaaaacagcttgaaaaccaatgagccagcaggtgaatgatcgcgtacgacagatgcttcacaccagtctacactcctggggccggtgccaaccctgggaagaatcagtaaaaggcagctcccctctgggctgactcagcctcgagacaggacacgcattttggcaagcggagcacaagttgggtgtcagcctccacctggcccctgggccacgaatccttggatggtgaacaacctgtgcaactgttcaaggcagcccggcactcacatgtagcagaatcaaaagggagcttgttaaaaatatagttccctgggccccagtcccagagtttccaattcagtccactaggactggagcccaggaggctgcatttgtcagccagctcccccagtgataatgatacccagtcaggatggggacttggaacaaacagcccaattagtaatgataataatcatcatcctggtaatagctaactctcacatagcacctcctgtgccatgtgggaggctctattctcagcactgtgcatgttaattcatttaatccccacaacacctctatgagttaggtcccaccatcatccctactttgcagattttgaagctgagacacagagaggttaagcaacttgttcaagatcacacagcgagaagagagtagagtcagattcaaatccaggaagtctgcttccagaacacacccccttcaccgcatcactaaagcgcccctaaagccggcactcagtgagcggctgtcaacccttatgtagcccctaccacgagccgagcactgcccagtgcttctcacagactcactcatttcatgctcacaaccctacaaggcagatctcgctatcatccccattttccagatgagaaaactgaggctcagagagattaagaaacccccctaaggggtgttgagtaaatgaagtagggaagggaaggggaagggaggggagcggaggagagggcaagaagggagggaagggagaaagggaaggggggaggaaggaggtggggagagggagggaagggaaggaaaagaggaacaggaaggaagggagggagggaggggaaggggaggggaggggagaggaggggaggcggaaggaaggggaagaaggaagggaagggaaaggggaaaaggaaggggaggagagagagggagaaaggaaagaagggaggaagggagggaggaaggaaggaaggacagggagggaagggaagggaaagaaaagaggaagaatgggaaggaaggaaggacagggagggaagggaagggaaagaaaagaggaagaatgggaaggaaggaagggagggagggagggaggagagcatgacgcaggaacaatgcatgaaacagagacaactacagggggcctgacctggtccccacagcgcagggccgcaggaggcgtggcaggcgcatgctcaccttggaggcccgcaggcccatgaagatggcgaagagcagcagcagcagggaggtggccaccttgaggtcggttagcaccaccatgcccacgttgacgaagatcgccacgccggagactaccagcatgaggttgagcagggcgcgctgcagggtgggcgtgcgcaccttcagctccggcagcagctgctccaggccttccagcggcgtgtccttgaaactcttcagtaccaggtgtccccgtttggtccgggctgccaggaccacccgcttaaagtatctcctgagggacagagacagaggcaggagcaggatcgggactgcactgcccggggagccccctccaatcctaggacgctcactctggctctacagtcgcacaaccatcttaaaagcgactcagtaatcatggggaagaaaccagggatcagctgtgtccaaccacaggggatcggttcaatcgcgccatcgatccctggtattggacgtgcagattgtttgttggaatcctggccgtgccgcatcttcagaatgtggacctccctctccgagcctcagttttccttattggaaaatggggagaactgtccccatcctttctcttcccctgggaatcaagtgtagtactcactttcccttgagaagaaaagacagcatttggatgagtcacgcctcccatttctcaacttcccgcctggggcccagacacccaaaccagacactgacctgtcagtcccctcttgactctaaccttgctccctcttgctgcagctggggaacaagggccgcctcacctctccgcagggggcagcttggtgaagaagccacgcctggagcccacgctggacttcaggggcatctgcccgactcgctggcccagggcccagaagtgaatgtagacatactgatccaaatttactgtcacctgccggggggatgaaggaagcagtggcgggtgaacatgggcaggagtgttgagggcaggataccagaatcagatgtcctgcccctaaataattcccccgtttcccacttatccccattcaccatctaggcagggctgtcacatatggttgtccatgtcgtatactgcacaagggctcatgatctaacacagtgccattcacgtagaagtcatctttaccatatttcctagaatctaaggtgccactgactctacctgattattttatgaagcaactaaaaacaaaatacgttgccaattaaatgatgtcacaccaccacctgtaaattacatcccaatttcagagatgacaaaacatgactttggaaaaactgcagtttaaaatcactaaaatgtggaatttggggagattttagtattttttatttctgtttttatttttatttctattttgagatattgtctcactctgtcacccaggcgggagtgcagtggcacaatctcagctcactgcagcctccacctcctgggtccaagtgattctcgtgcctcagcctcccaagtagctgggactacaggcacccgccaccatgcctggctaatttttgtatttttagtagagatggggtttcaccatgttggccaggctagtctcaaactcctgacctcaaatgatctgcctacctcagcctcccaaagcactgggattataggtgtgagccactgcacccagctgattttagtatttcttataattttgttagcattttgcgtgcttttaggggcttggttttttttttcttttttaatgtgtctctctgtgtgtgtgtgttttgttttgtttttttgagacaggttctcaatttgtcatccaggctggagtgcagtggcaagatcatggctgacagctcactgcagccttaaactcctgggatcaaatgatcctcccacctcagcctcccgagtagctgggactgcaggcccgcaccaccatatccaactaatttttgtattttctgtagagacggggtctccctgtgtcgcctagatgagtccggaactcctgggctcgagcgatcctcctgcctcggcctcctgaatgctgggattacaggaatgagccactgaacccggccttgtattatattatttattattacaattttggcagatggtgctaagtctcttgccctaagagagccatatcatatgatacttttccaacagatggcagtgaagtgacctgagacagcagcacctcctttttttttccagatggagtttcactcttgttgcccaggctggagtgcaatggcacgatctcagctcactgcaacttccacctcccgggttcaagagattctcctgccttagcctccccagtagctgggattacaggcacctgccaccatgcctggataattttttatatttttagtagagatggggtttcaccatgttggccaggctggtcttgaactcttgacctcaggtgatccacccaccttggacccccaaactgctgggattacaggcttgagccactgcatccagccaaaagtagccccttctctgagttcaccaagtgcgccatatgggccacagtcccaggctcaggactacaactcccagcagcccatgcctctcagaggctctgccccaccctagaggcctcctgggagttttgttctcctagggagccaagtacctggacctcatcctgagggtggtggaccaccagcgcgtaggccagggtgtcctcagacagcggggagaagttggcctgggccagcaggggctccagagcccgaagcacctcctgctcattagacagacgctggggatccgttagtgatggctgatcgagggtctccctgtcagggttgatggggtcatataaggcctaagaggagagtcagagagaaaaagatgggataggtctctgcatgaaggattctagggacatctaaggacatccctctccagatactttcatttatttatttatttatttatttattttattgagatagagtctcgctctgttgccaggctggagtgcagtgtcacgttctccgctcactgcaacctccacctcccgggttcaagcaattctcctgcctcagcctcccaagtagctgggactacaggcgcacgccaccatgcccgggtaatatatatatatattttttgtattttaatagagatgaggtttcactgtgttgcccaggctggtcttgaactcctgagctcaggcaatatgcccgcctcggcctcccaaagtgctaagattacaggcataagcca[137 bp omitted]tgtctcagcctcctgagtagctgggattacagatgcacgccaccatgcccggttaatttttgtatttttagtagagaaggggtt[132 bp omitted]gatggagtctcgctctgtcacccaggctggagtacagtggtgcaatctcagctcactgcaacctccacctcccaggttcaagcagttctcctgcctcagcctcctgagtagctgggattacagacacatgccaccacattcagctaatttttatatttttagtggagatggggtttcactatgttggccaggctggactcgaattcctgacctcaagtgatgcaaccacctcggcctcccaaagtgagattacagacatgagccactgtgcccagcagattcttttcttatcacacccatatccaatcctctggcaagttcacttgctaaacccctgaatcttcttgaatccaccctcctctctatctcctttgctgctatcttctcactgaagccaccttcatctctcacttaaacaattatgtagggcttctgttccccaacttttactcttactactttctttttatttatttatttttttgagacagagtctcactctgttgcccagggtggagtgcaatggcatgatctcagctcactgcaatctccacctcctaggtttaagtgattctcctgcctcagcctcccgagtagctgggactacaggtgcccaccaccacgcctggctaatttttgtatttttagtggagatgaggtttcaccatgttggccaggctggtctcgaactcctgacctcaagcgatccccccacctcagtctcccaaagtggtgggattacaggcgtgagccatcgcacctggcctactcttgctacttttcaaccagtatccacatggccattgggaagaacttactgaggctgtaaacagctcccacaatccacccctccaacagcttcccactgtatttagaataaaatctagaagctttccgtgatgttcaagttccctcacaaactggcatctaacctgcctgcctcatcttatgtccctaaacgtcccccctaaaaaactcttggaatgaatgtcgcgtgagtttccagttgcctagcctattttgctcacggagagactgagtctcaggatgacatataacttgtcccagactctacaacagcctccaaggaaatcacccctctataaaaccagatcataaacctaaccctccatgtgtctcttgggagcaggggtcctatgaagcagcttgttcaggccaggtgcgattctgaattagtggaaggagagagggccggttctccaagtgggaggaatggcctaagtgaaggtttggtcatggggaagcccagggcctcagaaacaactgagcaaggagactgggatgcagaagagattcaaaggccggcacagtggctcacgcctgtaatcccaacactctgggaagccaaggtgggaggatcacttgaatccag[140 bp omitted]ctcccaggttcaagcgattctcctgcctc[135 bp omitted]gcctcccaacgagctgggattacaggtgtgagccaccgcatctggtcttttttttttttttaattagccaggcacaatagtgcatgcctgtggtcccagctacttgggaggttgaggttggaggataacttgagcccaggaggttgaggctgcagtaaaccatgatcgtgccactccactccactccagcctgggtgacagagcgagaccctgtctcaaaaaaaaaaaaaaagaaaaagagaaagagtcaagccaagaaaatcctcctctgaagtaagccctagggctgtgcccacatcctccagcctaggctggtcgagcagttctgggacttacagagtgaccttgagaaattccattcccaggctgagctgcagtttgaaagctggagaaagaaatctgcattgatcaaatgtccactgtgagccagattctcttctggaaacttcacatcctcccagggctttgggccaaaaacctggacattgcacgtgatccctgttgctcccttccctgtcacaataaatcctgccgattccaccttcaagcagaccgcacttcacccagctctctcctccccacccgcctggtcccagtccatgccagccaccaccatttcatcctgcctgggtgagcccaacagccttctcaatagtctccccaaatcctgtaacacacaccatcccctgccaatcggttctttacacagcttccagggagatctcgtcaaacaataaaataacaacaatcatcatcaatgataatggtgcacatttacatagcacttactgtgtgccaggcacagattgaagtatgttacacgcacattctcacagtgtgaaactcctcatttacagatgtggaaactgaggcacagagaggttaagtaattgcccgaggtcacatggccaggaagtggtgtaaccagaatgacacatttgaccatgtcaatctcctgctaaaaccctcccaaggcttctactgccctcgggaatcaggatcacacttcctagtagggcctgcaaggcctcacaggaccgtaaatcccctcggtcactccataccatccagactgtctttaggttggctgggcgcgattgctcatgcctgtaatcccagtagtttgggaggccgagagaagaggattgcttgagcccaggagtttgaaaccagcctgggcaacacagcaagatcccatctctaccaaaaaaaaatacatttatatatataaaaattagccaggcgtggtggtgcacacctgtggtaccagttactcaggaggctgagggaggtggattgcttgaacccaggagattaagtctatagtgagccatgatcacagcttggcactccagcctgggcaacagagaagaccctgtcttcaaaacaacaacaacgacaaaccagattggttttagttcctccagccacagagactttgcacatgctgttggaagactctctctacacccttcctgcctccttcccttttcaccattgaagtcttactctctgtcatattctaggtccatcatcactatcaaaaagcctcggacaggggcagtggctcacgcctgtaatcccaacaccttgggagaacaaggcaggaaggactgcttaaggccaggagttcaagaccagcctgagcaacgcggtgaaaccccattgctactaaaaatacaaaaaattagttgggcatggtggcgggcgcctgtaatcccagctactccggaggctgaggcatgggaatcacttgaaccctggaggtggaggttgcagtaagctgagatcgcaccaactgcactccagcctggacaacagagtgtgtcagtgtgtgagtctctggctcaaaaaaaaaaagcagcagccttcctctactcatcaaactgagcagggccaccctgtgtggttgggcaggatgtacactgcacaaagataccagatctaagggcagacctgtccatttatcatgacagccacccttcagatggaaataaaggaacagaatagcaccatccactagaactccctgcagtgagggaaatattctagatctgcaccatccaataaggtcgacactggccataggtggctactgagcacctgaaacatgatcagtatgctgagaaacaaaatttg[134 bp omitted]cctccgcctcccgggttcaagtgattctcctgcctcagactccggagtagctgggatcacaggagcccgctaccatgccagctaatttttttttttgttgtacttttttttagtagagacggggttt[141 bp omitted]acagttccaggctagagaaagaggcacctttttctaatttgcacatggaccccagtatagcaaccaaggttcaggttcactctgttatccccctgcagggcaccatgcccatcgccctcatggtctgaacttaaccatcactggggagagcatctgattcatgaccgtccccaccacccacgttcagctcccagagcgcacgatgcaggcccagtttcactcctcagtgaagacacagcacctggcaccgg[136 bp omitted]catggtgaaaccccgtctctactgaaaatacaaaaattagccaggcatggtggtgcgcgcctgtagtcccagctacttgggagactgaggcaggagaattgcttgtactcaggaggcggaggttgcagtgagccaacacagtgccactgcactccagcctgggagacagtgagactacatctcaaaaaaaaaaaaaaaaaaaaaaaaaagaatgacttaattgggtctttgtggcaattgctgctgccatattccaccatcaagcattcccttgtggctgtcacatgccatctgtctactgaggactcccagatttccatctgcagtccagatatctcgcttgagctccagattcacacggctgggcgtctactcaatacttccatacagatgccccatgggcctctcaacacctccgcaagggcatcctctcaaacccacgatgccccaaacctgctcctctcagccttgtccccatctcaaaagatgcaactccatccttccaggtgctcaggcccaaagcctgggggtcatcctggagtcttccctttctcacacatccaacccattggcaaatcgtgatggtaacacattcaaaacagatgcaaaatctaactgcttctcaacccttggtctcagccaccctcctccctggcctgggagctgttctccccgccccgtccccatccccagtgggttccccaagcagccaccagagggcgccagtttgcacctacagcaattccagtctttgcttagaacactctgcttagccaccgacccactcagtcaaagcaaagtcctcaccaccgcccaggggggccctgcaagatctggccccaggtccccctccctctgccctcacctcctctctcttccctgggtcgccaggctctagccccgcaggcctcctggctgttcctccacacaccatgcacactgctgccccagggcctttgcacgtggagttccctcacatctccatagggcttgctcccctctccttcaggtctctgctcaaatgttctctgctcagtgaggccttcctgaccaccttacctgaaactgaaaaacaccccctcccttgctttccttttctccttattaggttttgaaaaaaagaaaaatacagtcatcccttggtatccataggacatcagttccaggatgtcccatggatacccaaacctacagatgctcaagcccctgatataaaatgacatgtctgcagccgggcgcggtggtttacgcctgtaatcccagcattttgagaggccgaggcgggcggatcacgagttcaggagatcaagaccatcctggctaacatgatgaaaccctgtctctactaaaaatacaaaaaattagctgagcgcggtggtgggcgcctgtagtcccagctactcgggaggctgaggcaggagaatggtgtgaacccgggaggcggagcttgcagtgagccgagatcaagccactgccctccagcctgggtgacagagtgagactctgtctcaaaaaaaaaaaaaaaacaccatatctgcatataacctctacacatcccctcatatactttatttttatttttttagagacagggtctagccctgtcccccaagctggaatgcagtgctgcaatcatgacttactgcagcttcaacctcccaggctcaagcgatcctcctgcctcagcctcccaagtagctgggaccacaggtgtgtgccaccacgcacagttaattaaaaaaaaaaaaattatggaggccgggcacggtggctcacacctgtaatcccagcaccttgggaggccg[133 bp omitted]tgaggcaggagaatcacttgaacccaagaggcagaggttgcagtgagccaagatcacaccactgcactccagcctgggcgacagagcaaaaatctgtctcagaaaaaaatatatatatattttgtggagacagagccttactatgttgtccaagctggtctcaaactcctgtcctcaaatgatcctcccacctcagcctcccaaagtgttagagttacaggcataagccactgtgcctggccacgtatactttaaataatcatctctctctagattacttataacaccaaatacaatgaaaacattatgtaaatagttgtaatgctacattgttcagagaataatgacaagggaaaaaaagagtctgtacatgttcactactgatgcaatttttttcccaaatattttttatccacagttggttgaattcacagatgcagaacccatggatatggagggctgactgtgcaggacaccacttacatctgaatttcagatcaacgacaaactttttttttttttttaaacggggtctcactctgttgcccaggctggagtgcagtggtgtgatctcggctcactgcaacctctgcctcctgggtgcaagcgattctcctgcctcagcctccacagtagctgggattacaggcgccagccaccatgcccagctaattttttttttgtattttagtagagacgggttttcaccaggttggccaggctggtctcgaactcctgacctcaagcaatccacccgccttggcctcctaaagtgctgggattacaggtgtgagccaccatgcccggcccaacaacaaacgatttttttagtttaactacatcccatgcaatattggatgactgtattgcataggacacacttccactgtactaaaaaattacacatagtttatctgaaattcaaatttactgggtataatgagttgaatgttgtcccctaaaaatttacatccctttggaacctcagaatatgatctcattcggaaatagggtctttgcaggtagaattaaggtaaagatacagatgagatcatactaaattagggtggaacctaaatccaatgagagtgtccttataagagacagaaaaggacacacataggacaccgagaaggcagccacaggaagatggagacaggggttggagtgactcatctacaagccaaggagcaccaagggttgctggcagctacaggaagccaggagagacaccatagatgcttccctctcagggcctccacaaggaaacatcttttaatacatttcacttcttttttttttgagacatagtctcactctgttgcccagactggagtgcagtggtgcgatcttggctcactgcagcctccgcctcccgggttcaagtaattatcctgcctcagcctccggagtagctgggatcacaggcatgtgccaccacacccagctaatttttgtatttttagtagagtcggggtttcaccatgttggccagattggtctcgaaatcctgacctcatgtgatccacctgcctcggcctcccaaagtgctgggattataggcgtgagccaccgcgcccagactttttcttttttttttttttttttgagacatagtcttgctctgtcacccaggctggagtgcagtggtgcgatctcagctcactgcagcctccgcctcctgggtgcaagtgattctcctacctcagcctcccgagtagctgggactataggcacccgccaccacacccagctaatttttgtattttcagtaaagatggggtttcaccatgttggccaagctggtctcgaactcctgaccttaagtgatccgcccacctcggcctctcaaagtgctggaataacaagcgtgagtcactgtgcccggccaaatttcacttctgtaccttgttgctggtctcttcctcagtagaacagagcctgtgaggtacatctctcatgctgtccactgtctcccagagcctcaagccattccagagacacagtaggtgctcaataaatatttactgagcgaactcaatgaatgaatgaatcagcgaaaaaagatcagagagaggtcacccgccaaggtcacccgcaccactagtgaacaaccaagctattgtttgaaccgaggctatgctgcttctttccctgcccaggccacatcttcaaaggacttaagtcatcagcaaatggtcacccagcgggcctcacccgcctctgccacttctaccctgcccctgcctctgtttaaaatctcctgcctgggagatatatgcttattcacttatgttctttctacatttctatatatttatacatttctataataaaataggctttttttaactttttttttttaagaatcttgctctgtcacccaggctggagtgcagtggcgtgatcttggctcactgcaacctccacctcccgggttcaagtgattctcatggttcaagtgattctcatgcctcagcttcctgagtagctgggactacgggcaccccccaccacaaccgactgatatttatatatttagtacagacagtttcaccgtttgccagactggtctcgaactcctgggctcaagtgatccgcctacctcggcctcccaaagtgctcagatcacagacaagacataccaagcccagccttaacttttaaaaaaatagaaaaagaaaaaaacaaccgtggctccagaggccataggtgccctgtggaagagcttggaggcaggcagacgggggcttgatctcgactccaccaattatgaactgtgtgatcctgggcacaacccgggccctctgagacattcagtttctccatgtatgaatgggctgatggcggctgtctctccgcactgcaggaaggagtcaataagccagacacagcaagcgctcagcaacaaggggctgtgatggccactgttgctggggttgttattattcaaagcaaagtgcggagctgcagaaggcagtggtgggatgtggcgaggggtgaatgcagcaggcctgggttgtccaaaccccgcacattccaaagaaaggaccggccctggaccagcttctgggagggaacctctaagcccttggaatgtcctgactgataagagtgtcttggtttacctggggcctggggccacactggatgctgtgtgttaatgttgtcatctatggtcagggcctggagccactgagcatcagtttgacctcggaggggctggagtctcaggtcagccaccatgcatatgtgactgacccccagtaaaaaccctggccacccaggcttacaggagcatccctggttggcagtactgcttgcgtgttgtcacacatcttgctgggagaattaagtgccgtccatgactccaccgggagaggacagctggacgctcacgcctggtctgtcttggattctgccccatgtgcctttttcctttttttttcttttttttttttgggatggagtctcactctgctgcccaggctggagtgcagtggcacaatctcagctcactgcaacctccgcctcctgggttcaagtgattctccttcctcagcctcctgagtagctgggattacagctactgggattacagcgccactatgcccagctaatttttgtacttttagtagagacagggtttcacc[133 bp omitted]ctctgtcacccaggctggatagtgcagtggcaaaatctcagctcactgcaacctccgcctcctgggttcaagcgatctcctgcctcagcctcccaagtagctgggattatagacatgcgctaccaggcccaggtaattttttttttttttttttgagatggagtttcactcttattgcccaggctgcagtgcaatggtgcgatcttggctcactgcaacctcctcctcccaggttcaagcaattctcctgcctcagcctcccgagtagctgggattacaggcatgcaccatcacacccagctaattttgtatttttagtagagacgg[145 bp omitted]ctcactctgtcacccaggctggagtgcagtggcgcgatctcggttcactgcaagctccgccacctgggttcaagcgattctcctgcctcagcctcctgagtagctgggatgacaggcacatgccaccacacctggctaatttttgtatttttagtagagacggggattcatcatgttggtcaggctggtaatttctgtatttgcagtagagacagggtttcgtcatgctggcaaggctggtctcgaactcctgacttcagctgatccacctgctttggccacccaaagtgctaggattacaggcgtgagtcaccgcgcccggcagtactaccatctattaatagatcctcccacagcagtttctcagcccagacctctcccttcacctccagatccacatattcaagtctatctttctttttttttttttttttttttctgagacggagtctcactctatcgcccagctggagtgcggtggcgcaatcttggctcactgcaagctccgcctcccgggttcacgtcattctcctgcctcagcctcccgagtagctgggactacaggcgcccgccaccacgcccggctaatttttttttgtatttttagtagagacagggtttcaccgtgttagacaggatggtctcgatctcctgacctcatgctccgcctgccttgtcctcccaaagtgctgggattacaggcatgagccaccacgcccggcctcaagtccatctttctacctgcctttctaaaaggcagctcaatggataaagaaaatatggtctatatacaccatggaatactactcagccataaaaaggaacaaaataatgtctcttgcagtaattggatggagttggaaggccattattctaagtcaagtaactcaggaatggaaaaccaaatagccgtattctcactttataagtggaagctaagtaagctatgagggtgcgaagatacacagagtgatataatggaatttggggactcagggaggggggttgggatgggggtgagggactacatattgggtatagtgtacactgctctagtgatgggcacaccaaaatctcagaatgcaccactacagaattcatccatgtaaccaaaaagcacatgtaccccaaaaactactgaaataaaaaatgttttaattaaaaaagaatgggccaggcacggtggctcacgtctgtaatcccaacactttgggaggccaaggcaggtagatcacgaggtcgggagtttaagaccagcctgagcaacatggtgaaaccccatctctactaaaaatacaaaaattagccaggcgtactgacacacgcctgtaatcctggctattcgggggactgaggcacaagaatcacttcaacccggaagacagaggttgcagtgagccaagatcgcaccattgcactctagcctgggcagcagagtgagactctgtctcagaaaaaaaaaaaaatatattagaataaataaattcataaataaatggtagctcaaattcttaagtccaaaactgagctctcagtcctccctgcagatctttctccccatcccaccacggtctcccccatcccagtaaatggcagctccatcctccaggaggctcaggccagaactgctggagacgcacccctactcctctctcttcctccccagaacacccccacagccagcacatcagcaaaacgctgatgccttccaacataaccagcatctgaccgtttttcaccatttccatcgctattacccttgtcggagcttccattatctctcccctagacaaatataatagactctttcatagatgtccctgcctctgatagtctgttccctacactgcagccagagaaatcctgttaacacctaaatccgctgctcacatctctcctcagctcagagccctcccatggctcccggctcactcagagtcaaagcaaggtcctcggcctggcacagtggctcacgcctgtaatcccaacactttgggaggccaaggcgggtggatcacttgaggtcaggaattcaagaccaccctggccaacatggtgaaacccagtctctacaaaaagtacaaaaattagcagggggaggtcgtggacgcctgtggtcccagctactcaggaggctgagggaggagaatcgcttgaactggggaggcggaggtttgctgtgagctgagatcgcaccactgcactccagcctgggcaacagaacaaaaactccatctgagaaacaaaaacaaacaaacaaaaaaacaaagcaaggtcctcacagtggcccacaaggcccagtacgatctgtccccatcccctctgccctcatatcccaccctccccgcacattcactctcctgcagccacagtggcctcctcactgttcaatactccaggcctccactcacctcagggcctttgcacttgctcttccatctgccaagaacatcctcccccaggcattcatcaggctcgttccccctcttcactaagcctttagcccacatgtcacctccttggggagcccttccccacccaccccgtctgaaacaggccccatctcacccctctttgttttttttttttttttgagacagagtttcctcagtcgcccaggctggagtgcagtggcgcaatcttggctcactgcaagctccgcctcccgggttcatgccattctcctgcctcagcctcccgagtagctggaactacagtcgccccccaccacgcccagctaatttttttgtatttttagtagagacgaggtttcaccg[139 bp omitted]tggcacttatcaccaccaggcatcatattttatatttatttgattccttgtctccccacttggaatgttggctccatgagggcgtcacttcacctgtcatgttcactattgaatccccagcacttaaaataagggccaggctccaagaaggtgtcagggaatgtttgctaaatgagcggatgctcgaacaagcaccacagggctggaagggccccgtcctcacctgcagccgggccaggatttggtggtagtggaacagggtgcagaagtccacgtgggccgagaacgcctccaaagccgccttctctgccggactcgagtggaattcctgttacctcaggaagcaaaacttctctgtaggccttttccccttccccgagggaaagaattctttccctggctgcctaactacacaatca[132 bp omitted]aaatcctgtctctactaaaaatacaaaaattagccgggcgtgatggcatgcacctgtagtcccagctactcaggaggctgaagctggagaattgcttgaaccagggaggcggag[131 bp omitted]gccaaatatagtgaaaaactatactgggcttaaaaagctggaggttcaagtttttgctttgacatttcctagccaatacacacacacacaattccaggaacggtttgacagtgtaatatcatcctccagaagtagatggaattattattattattatgttgagacagagtctcgttctgtcacccaggctggagctcagttgtgcaatctcagctcactgcatcttcaacctcctgggatgaagcgatcctcccacctcagcctcctgagtagctaagactacaggtgcccaccaccatgcctggcgaatttttttcaattttttgtaaaggtggagtctcactatattgcccaggctggtctgaactcctgtgctccagcaatcctcccacctcagcctcccaaagtgctgggaggctgagccaccatacccccaaggttgatggaattataactcccatttgtcagtgggagaaactgaggctctggaaaagtcatttggtaagggctgcagtgtctgtgggaaatgactgctatctaggcctgtctgactccagggtacacattgaaccatttcctttttttttttttttgagaaggagtctcactctgttgccaaggctggagtgcagcggccatgatctcagctcactgcgacctcttcctccacggttcaagcaattctgcctcagccttctaagtaactgggattataggcgcctgccaccacgcctagctaatttttgtacttttaatagagacggggtttcaccatgttggccaggctggtctcaaactcatgacctcaggtgatccacctgcatcgacttcccaaagtgctgggattactggcgtgagccaccatgcctggccttgaaccacttcttcttctttttttttttttgagatggagtcttgctctgttgcccagactggagtgcagtggcacgatctcggctcactgcaagctccgcttcccgggttcacaccattctcctgcctcacctcccaagtagctgggactacaggagcctgccacctcgcccggctaattttttgtatttttagtagagacg[148 bp omitted]attgtcttcacttctctgagcctcagtttcctcactggcaacagaggattacacgctctttcttggagggctacggtgagaatttgatgagattacacatgtcctatatacacatgtgtttacatatatgtgcatatatttgtatatttatgtgtgtatatttgtgtacttttgtgtgcatatatttgtgtgtgcgtgtatttgtgtgtgtgcatttgtatgtgtatatttgtgtatttgtgtacacatatttgtgtatttgtgtgtgtacttgtatgcatatacttgtgtgtatttgtgtgtgtgtatttgtgtgtgtatcaagtccagcacagaattgagtacatacagtaggtgttcagtaaataaatgttaaattaatgaatgatggtgaggtgtggtggctcatacctgtaatctcagcactttgggaagccaagatgggcagatcacttgaggccaggagttcgagaccagcctggccaacatggcaataccctgtctctactaaaaatacaaaaattagccaggcaagagtcccagcctctcgggggctgaggaaggaggatcacttgagtctaggaggcagaggttgcagtgagctgagattgtgccactgcactccagtctgggcaacagagtgagaccctgtctcacaaaaataaataaagaaaaataaatgaataataatcctcaaaatcctcaataatgacaatgatgatgatggtggcaataagacctcaggttctagagtgagaccaagactaggatgaggtgaatatggcacccaagggtgcaaaatttaacggggcactcactcttagggtcaagcgagtgccctacttgcctaaccctagtcctgggccagctctggagtcagaccactttggttcaaatctaagccactatgttgtggccttgggtaagtcactttccttccctatgcttccattatctcatctgtaaaatggggatgatggtggtatctctcttactgatgattcaacaatacatgaaaaatgtctggcacagtgccatggagtcagagctcaaattgtgtgataataattatgattacagcgttgtgactttataggtacaattattatcaggtagtagaaatagtaatgatgaggatgattactatacccatcttaaagagggaaaaaccatgccccagagagtgcctgttcaagccctcagaacaagccagagttgggaatggatgctgcgtctgcatctcggagacctggctcctgcattccagctcatctcccgcccactagggaaacacgaagggacccgggaactacaactcccaggaggcgccagggcagctctctgcagcaactagggccctgccgccgcgaagcctgctgggagccgtagtccccaggctcttgggcctgggacaggcggtacctgtattaggaggcggagcagctgctccttggagaagggaatgaagcgctcgcggtactgctgggcccagtcgcggggctccctggggttccacatcttgcgatactcccccattttggctgccagcgatgagagggcccgggggggcccgaggagcgcgggcaacagtggccatactcggaccctggacccccagaccccccgggtcacatgcagcatggctagaccctttccccggagcctaaacagaggaaaatgggcaggggtcaaaggccatctagaggaaaagcgccctctccacctccacgtcccaccctccagaagccgtctctaccccaggcagggcgcagagcccatccgctcgcctcaaagcccctgttgcctgtccccttcccacactgctcagttggcctgggtcccagacaggggtcagaggtcttaggttctggggcgtttttcaggcccagagaccctgtagtggtacaacgtttctttggggtctagacagcgaggtagatcttaggagagcaggaaatgctcgtaaaggttacctagggggtgcagggccgccctccctggccatgcaatcccccgatttctccctcaccttagccaaagctcgactgtcattgagcctcctgcgcatgtgcaggagggcgtcctgggctcccgaggttcggcttcacccagcagtaaaacgcatgcgcaaagcttcggtcaatgcgggctgtccatttctcaccgccgactccctacatcaactacgcatgcgttgcctgcctttctccaccgccggcctcgtttgggcgcgacgcatgcgccgcaggagtgtctccttgtcagcttgctacaaagggaaggggcggtgtggacgcgagactccctagagggatggggcggggtagggctcccgcgcgcagtccgccaacggcgcgcagtccaacgttcgccgaggccacgccccggctcgtgtcagctcctgagtaggcggaaagagggagggggcgggacttgggcgcagccaatcagctgtggaggagcgaaaaggcgggaaaaagcggaaccaaaagaaggctgaggtggcgctagggaccaggaggggtgggggtggcgaaaggaagggcgggccctcaggtgacgcagattggccctccagagaaggggcggccccttctcaggtgccgtcacccccaaacctcagcactgccattccaggtccttaaaggggagaccgcgattctaagaaggtagcccagtgccggggcgtggcctcattctgaggttccccacaaatccgaggtcccgactcccagcttgaggaggtgcacttccgtgaaaatggagctgaattcgaaagggaggcccttattctgggaaatggccccaagtgacaaggacagcctgaaatatgccctgagatacctgggttctccacgaagggtgctgtcacccccaaacctgaaagggattattcggtttcagacctcccaggggctctgatctcaatggccgcaccccctagtccccagaaagtcccacctgtgtcctctcacagaaggacccagtccctctgcaggcccttcagctcctgggtcacaagacgtggtccccaaatatcccagccctcccctgcactccacctctgggatccctgacagccctctcgcccaacaaccccctcagcccacattcctgacttctggaacctgaagcagccccttcacttatgtcccccactcctgggacccccagaatcaccctcaccccaggccctcacctctctggaatcctccatagacccccttaacccacacctcaacccaggggacccttagcgactctctcatcctgcacctccacctctgtgacccctggcagccctccccacacgacaccttgcctgggacccctagtatccccatcctatgcccccctctcctgggacccccagaaagctccctcaccacacacaaccccattcctgggaacccccagcacccgcatcctatgtcccccacttcagggacccctagcagccctctccacacaacacctttcctgggaccccccagaacccccatcctatgcctcccacttctgggacccctagtagccccctcaccacacaaccccattcctgggacccccagcacccccatcctatgccccccactcctggggcccacagaagccccctcagcacacacaacctcattccctgggacccacctgcacccccatcctacgtccccgacttctggggcccctgacagcccattcaccccacaccctgactcctaagaggctcagcagtcccctcaccccacacaactccattccggggaccccccccatccccaccccatgtcccccaatcctggggcccccaacagcccttccaccccgtgcccctgactggcatcccccatctgtgtcatcccacagcagccaagcccagggctggcctgaagcccccggacggcagtgcccagcaggcagcgcccagcaccctggctcccacctcccagtggccccaaaggaaaacagctgccatgcacatccccaaaagcctccaggagctggccaacagcgaagccgtgcagtttctgagaaggcccaagaccatcacgcgggtcttcgaaggggtgaggccctcccatggcccgactgtgcccctgggtgacaggagccaggagctctcaactcccagacacagtgcgggagatgggaggacaaggaaggggtcagacggggaaacaagacaacggagcaaatgctgacaccaccttttcctgagcaccccactataggccctatgctattgaggcactgatggactctcatagtaaggaacagccctcacagtaggtgctgcaagtcccatctctgagataacaaaactagggcttagaaaagttaagtaaattttttttctttgaaacaatcttaattagccaggcatagtggcacacacctgtaatcctagctactgaggaggctgaggcaggagaatcactcgaacccgggtggtggagtttgcagtgagtggagatcataccactgcactccagcccaggcaacagagccagactccatctcaaaaaaaaaaaaaagaaaaaagaaaagaaagaaacagtttcgctctgttgcccaggctggagtgcaaaaagcagtggcgtgatctccgctcactggaactccacctcctgggttcaagcgattctcctgcctcagcttcccaagtagctgggattacaggtgtgcgccactgcgcctggctaatttttgtatttttagtagagatggggtttcgccatgttggccaggctggcctcaaactcctgacgtcaagtgttctgcccacctcagcctcccaaagtgctgggattataggtgtcagccaccgcgcccagcctaagtaaattttttaaatctgggatgtccagtggggtagccacagccacatgtggctacctcactttgcactaattaaaataaaagtccattcttcactcacagtggccacattttaggtgctcaacagccacatgtggctggggactctcatattagacagtacaggctgggtgtggtggttcatgcctgtaaaaccagcaccttggtaggccaaggcaggcagatcatttgaggtcaggagttcgagaccagcctggccaacatggcgaaaacccatctctactaaaaatacaaaaattatccaggcatggtggcgcaagcctgtagtcccagttacttagggggctgaggctcaaggatggcttgagcccatgtggcggaggttgcactgcagcctcggtgacagagtgagac[135 bp omitted]cccatctctactaaaaatacaaaaaaattagctgggtgtggtggcaggcgcctgtggtcccagctactctggaggctgaggcaggagaatggcgtgaacccgggaggtggagcttgcagtgagccgagatcacaccactgcactgcagcctgggcgacagagcgagactccatttaaaaaaaaaaaaaaattagtgcagatatgggacattttcatcatgccagagagttctattagacagcattggctaaggtcacgcagtaacaggcaggggcaggattcaaactcagatctgtgagatgccagagcccatttattttccacctcccagttgagggaggaggagaaggagaggaacaggggctggggcttctaggaagagaataaggagtgcagccctgaagtgccagatgttgggtggtaaccgtgtgccaggcaccatgccaccgttcatttcatcatccccacactcctgaagaatctggacacctggagtcaaatcctcattcagcccagactttgctgtgtgatcttgaaccaatcactgttcatctctggatctcagtacatgaagggttagggctgtggctctgacctttaacctgtgctgcttccaccactccgctttaacagaattggaaactaaggcccagggagatgttgagacttgatcgaggtcttaggagtaggtggagttccccggctcagacccagggtctccacccccagagtgctaatccagagtatctcctctctgccccttctagagcctgagcttggagaaggaacaaacaggcctggaatcctggctcaggcacgtgctgtccatgcaaagtggcatactgcccagtttacctgggccaggcctgatgtccttaccagcagcagcaactttctttctcaaaagtgcccctttggtttgatggcttgcctggtcaccctgtgtccgtgtgaccctgagcaagctatgtgatttctctgaacatctccttactctcgtctgtaaaaagaggatcctaataatctactcctaggaagaatcattgtgaaaatgtaacaaattaatgcctataaactgattagcatgggccaggcaagtagtgatctttccttagtgatttttttttctttttctttcttttttttgagacagacccttgctctgtcacccaggctggagtacagttggtgcagtctcagctcactgcaactttcgcctcctgggttcaagcaattcttgtgcctccggagtagctgggattaccagcgtgcaccaccatgcctggctaatttttgtatttttagtagagatggggtttcaccatgttggccagactggtcttaaactcctgacctcaaatgatccacccgcctcggccttccaaagtgttgggattacaggcgtgagccaccgcacccaggcttaaatagtgattattatcaaaacaaatcattaccgtgtgtgaggagagggcctaggatgattgagatttgtgtccgttgtcctcccccagggaaagaggggaatcttgaaaaccgcatcccagcaccagatctttcgctggtgttagtttctctactcctcaccacaaccctgtgacacaggcattatgatccctgtttaacccaaggggaaactgaggctcacagaggttgagtggcatgcccaaggacatcacccagctggtgagcaagtccaactcggatccacccacctatctggaaagcctcggaaggcagggcgggtggcaaggagacggaagcccagctggtgtggactggtgcggggaaggaggaggaagagccgccaaccatgccagacgttctggtcacggactttgcccgccgcctccttccaccgtccctacccccccgccctctcctccttcccccctggcctggctcctcagtagggagtctctgggcagctggtgctcttgtcctcgctgccgcctgccagctggtgccttaactgataaatctttgctccctccctagggacaggccagggagggcatggaaggagtttggactgaagcttaagagggatagggtccctctagcccagatgagcccctgctcctcaaatctccagtgtcccgggctcatgtcacagcccagggttttgggggtcagtggacagacagcccaccggcctagatgtcaggagggctagattccaatccccctttcaccacttactgaccttgagaggacgccttccctctctgggcaaatcacaagaatgaccattttcctgagcacctactagagccaagcccctacccccacattcctccttttcatagcatagaaacagaccaggaaactgaggctccaagagatgagtgatttgccccaggccatacagctggcacagtcagaagcatctggctctttccactccaccaaaatggcttcgatttatcacctgtgaaacagaaatgaattaataatctccaccacgtggggccggtgtgaggttccagggaggtaacgcaggtaaaatgaatatgggctcaaaaatgatcaatgtgctttcttgtcctcgacctgactctgcctcagaccagcagggccagacacaccccctctacagtcagttcttctgctccaaaatagggagaatcatcttacagcctccctccaagggttgctgtgcagatcaagtgagatgatggatgtgaatacccttggttattgctgaagggctaggcaaaaacagggagtcagggtgttgctgctgttgttgttcacagaaggcaattaaggcaaaggagaagggaggatggacggaagctcaggagtttaggggtccgttctttgcctcctccatctccactctgaagggcagggcaagagtcaagacaagccaaagccattcactctttcaacacacatttgctgaagtccagtctagcgctgggtgctggggatagagagcaggggcccggcaaggtggctcacgcctgtaatcccaacactttgggaggccaaggcaggaggattgcttgaggccaggagtttgagacccacctgtgcaacatagcaataccgtctctacaaaaaattaaatatgagtgaggcatggtatttcgcacttgtagtcccagctactcaggaggctgaggtgggaggattgcttgagcccaggaggtcgaggctgcagtgagccgtgatcacgccactgcactccggcctgcaagacacagtgagacactgtctcaaaaaaagaaaaaagagagagagagtcctgtgtggagcctatccaggaagagttccaattctaacgaaggggagattttctttttcttctcttttgagacagggtctcactctgttgcccaggctggagtgcagtggtgcgatcacagctcactgcagtccagacctcgtgggttcaaatgatccttccgccttaacctcccaaagcactgggattacaggcatgagccaccacaccagaccaaagagaagattttcaacagtctgtttcccttagcctacccccgccatccccaacccctatcgccaacactgccacttccaatcaatcaccaagtcctattttacacgctaaatattactgaattccccagggctctggcctcagcctttctcacctgggcctccccgcctcctctcaggtatgttggcctcttgtcttgcccacctccgatccatcagccacgtgaccccagagggcttctctaaccccaaggctgaccccagctgtcccctgcacagaatcctcccatgcataatattgaatgctttccatggctccccaagtccggctcctggccctggtgttccgggcctcttagagcctggctcccacccacttttccagcctcatctcacaccagaaccctccagtgagtttctctcttatctctgaaactgcccgctctgcagcatctggcttttccacatgccatccaccctgccgggaatgcccttcctcctcttgtctgtctgagaaactccttgttctttaaggtccagttcagaactcacctgaaatccagccctcaatctggcttccaccttgactctctcccccaccccaggccccagcctcctccccaccaccccatctacacaccagctcgtctttgtctggcacagacctgccctgctgcattgtgaccatctgggacaaatcactggggcttcaaattttcaccgaatttcgttgataggagcccccgccctcaaggcgcgtggtccagtgtgaggaagaagagcaagaggtcaagggcagactcagaagccaggctacttctgttcaaatccaggctctgacactgaccagctgatttttttttttttttttgagacagggcctcactgtgtcacccagcctggagtgcagtggcacaatcagggcttactgcagccttgacttctgggtctcaagtgatcctcctacctcagccccccaagtacttgggactacgggtgcatgccaccacactgagctaattttttttttttaagaagttttggtagatactaggtatcactctgttgcccaggctggtctcctgagctcaagcgattcctcccaccttggcctcccaagtgttgggattacagatgtgagccactgtgcttggccttttgtttgtttgttttgagacagagtcttgctctctcgcctcggctggagtgcagtggcatgatcatggctcactgcagcctcaacctcctgggctcaagtgatcctcctgcctcagcctcccaagtagctgggactacaagtatgcaccaccacacccagctatttttgtttttaatatttttgtagagactgggtctcgctctgttgcccaggctggtctcaaactcctggcctgacacgatcctcccatctcaacctcccaaagtgctggaattacagtcatgagccacctcgcccagccactggccagctaattggattcggccaactccttatcctctctgtgccccagttccattatctgaaacacagggctgtgagtagtgcccgtgtcctagggtggctgtaaggatgacctgggtgagtgtttatagagtgtt[224 bp omitted]gctgaggcaggagaatggcgtgaaccccgggggccggagcctgcagtgagccgagatggcgccactgcactccagcctgggtgacagccagactctgtctccaaaaaaaaaaacagacgagagggacagggttaccagatcagtgtcgtagtatttgtctaaaacaaaatcccgaagccaaaaaacaaggcaaaatgttaatatgtgttagtttggccaggtgacactgggtgtttcttatgtttctcttcgtatttttctgtatgcttggactatcttgcaaatgaacctaagaaattaataggaattagtgaggccaggagggaagagacagaagtcgcagagggaagggctctaagtgcctcctctcgtttagtcctcagaaccaccccagagggaagagctgagaggcagagagaataatcacgactgcaaacactgattcagctcttcccatgtcccgggcactgtgccaggcattttatatgggtacctgggtttggtggcagaaggagagtgtgggggaggcaggggtgagtgaggagagatgaaattggaagagtgagggaagcggagactctgcagggcctccaaggccaggcttcagggctgggactcagtcctgaggcactggggagccatgaggggctgtggcagggaggggcagggtgtggaaagactcccctggggccatggtggagatgtgctgaggtggggaagactggaggtggggaggctgggaggaggctggggcaagggccaaggagagcagacgaggcctgagccaggatggagcagaggggacgaggggcaggaagctgagggctctgacactgtgacaatgtcaaagagggagaggtccagacggaccagtgactgggtatacggaaagaccgacagcaccagggaggaaggaggagcagcttcagggagagactgagctcttctctggcccctggaaatccacaggtcttctccctgatcgtcttctcctccctgctgaccgacggctaccagaacaagatggagtctccgcagctccactgcattctcaacagcaacagcgtggcctgcagctttgccgtgggagccggcttcctggccttcctcagctgcctggccttcctcgtcctggacacacaggagacccgcattgccggcacccgcttcaagacagccttccagctcctggacttcatcctggctggtgagcccccaggacccccaacccagagctgcccctcctcccgctcacagccctcctggctccccagggcctcccgggcacaacccttcaccacctagccggcctccaccctgactgtcctcccagtaggaggcatctgaccacaagtggcccagagcttctcactgtgcctggcacctgctgtctcctcctggggaattatttttatccttcagaccctgggtaagggtcacctcttctgacccccagacaaattatagcagcctcccttctgccccgtgccttctttgcatttgcttccctcatttacagaaaatctctcttttttttttttttttttttgagatggagtctcactctgtcgccaggctggagtgcactggcacagtctcggctcactgcaacctccgcctcccgggttcaagcgattctcctgtctcagcctcctgagtagctgggattacaggcgcacaccaccacacccggctaattattttttgtattttagtagagacggggtttcagtg[137 bp omitted]agcctggcataagcaagcacaaaatgtgtgtccttctttggggcctgacctccttcctctcagtctgtttgatctcaactcctccccaccctgccgctcctcctccctactgggccagtcccagtgacttagggccaagggagccttagaaggtcatcgaatctagtgctgtgcaggagaactccctgtgagggtggaaatgttctgtccctgcgccttctcatgcaggagccactgaccacccgtggctattaagcacttgaaatgcagctgctggccggggacggtggctcacacctggaatcccagcactttgggaggccaaggcaggtggataacttgaggccagaagtttgagaccagcctggccaacatggcgaaaccctgtctccactaaaaatacaaaaattagctgggcagggaggcgagtgcctgtagtcccagctactcgggaggctgaggcaggagaatcgcttgaacccgggaggcagagcttgcactgagctgagattgcgccatggcaccccagcctcggcaacagagcgagactctgtctcaataacaacaacaacaaaaaaagaaatgtggccagtgcagctgagaaacattttttttttttttttttgagacagagttgcgctctgtcgcccaggctggagtgcagaggcgcaatatcagctcactgtaacctccgcctcccaggttcaagcgattctcctgcctcagcctcctgagtagctgggactacaggtgcccgccaccgtgctgggctaatttttgttttttcagtagagacggggtttcgccatgttgcccgggctggtctcgaacacctggcctcgagtgatccacttgcctcagcttcccaaagtgctgggattacaggcgttagccacctcgcctagcctaaaatcctgtgttaatgaatagaaatttaaaccgctgcatgaggccggcggctcctgtattagacagcgcaactctactccagcagctcactttagggaaggctaggagggactggggaatgacttgtgggagatgtgtcaacatagaagctaataaaaaaagtatttttcaatacctcgtggaagttcgtgcagcaagaccaccagccccatccttcccatgcctcagcagccctgcctgagtgagctttccccctgccccttttctctccctgtgacgccacagttctctgggcagttgtctggttcatgggtttctgcttcctggccaaccaatggcagcattcgccgcccaaagagttcctcctggggagcagcagtgcccaggcagccatcgccttcaccttcttctccatccttgtctgggtgaggacaagcccctccaccacccctccctaggagggcaccctctgcagggtggggttgaaagggctagaacattcctgctctcacttagctcccctgggggtcaggggtcgggggttcccccaggactccactggtcccttccaggtgccgcttcctctgagcagccacagcccagcatcagggcctgtgctttggcctagggctcctgggcagtgagcagtccaaacaccggtatcttttgtctccttcccaggccagtccccagcccagtccctctcctgacctgcccagcccaagtcagccttcagcacgcgcttttctgcccacagatattccaggcctacctggcattccaggacctccgaaatgatgctccagtcccttacaagcgcttcctggatgagggtggcatggtgctgaccaccctccccttgccctctgccaacagccctgtgaacatgcccaccactggccccaacagcctgagttatgctagctctgccctgtccccctgtctgaccgctccaaagtccccccggcttgctatgatgcctgacaactaaatatccttatccaaatcaataaagagagaatcctccctccagaagggtttctaaaaacagccctcagtccttctcatgtctgttccactctggttgcttgagtggcgagggtgggtaagaatcccacaaggtcaccgctggggtctctgcactgggtcacatttccataccatctcctggaaccatcactggg[141 bp omitted]ctgccttccaggttcaagcaattcttctgcctcagcctccctagtagctggcattacaggtgcgcacctgtaatgcccaccaccacgcctggctaatttttgtattttcagtacagacggggtttcaccatgttggtcaggctggtgtcgaactcctgaccttgtgatcctcccacctcggcctcccaaagtgctgagattacaggcctgagccaccgtgcccggccaggaagcactttcttcaggcctgttacacactaagtcctgtcaagtcactactccttgagtccccacactggccaggggagggaggcacaaggagcctcctcttacagttgaggaaaccaaagttcagagagaaaatgcttccacccgtggagagagcaccaagaggaagggccaacaaggggacccagccctgtcactcaagcccaagccctttcactcctcatggtgaccaaagactaaaaaccatggcgtgtgaggagtcagtgaaggaacggggtgctgagtccgcgaatgagattcaagggagacccttgtcttcaaatatttcaaagaatatctttggggaggaggagttttcattccaggagaaccccagtggtaagcgggggactcaggcacgggccacaaacgttcctacctgtaggagccaggcaggaaaccccagtgggtgaagcgcctattaagggaatagtgggaacagggccacatccaggaggggcagccttcactcagcgcacattcagtaacggggcctggagtttcttttttttttccgagatggcatctcgttttgcagcccagactggagtgcagtggtacaatcatagctctctacagccttgacctcctggcatcaagcaatcctcctgcctcaagccccaaagtagctgggactacaggtgtgtgccaccactcccagctaatttttcaatttttttgaagagatgggatctcactatgttgcccaggctggtcttgaactcctgggctcaagcagtcctcctgccttggcctcccaaagtgctgggattataggcatgagccaccacgcctggccagcctggggtttctagaacagtgctgtccacttgaaatctgatgtgacacccaaggggagtttaaaatagtctagtggccacattaagaaaagtaaaacaaggtggatgcggtggctcatgcctataatcccagcactttgagaggctgaggtgggcagatcacttgaggaggccagaagttcaagaccagcctgaccaacatggtgaaaccccgtctctactaaaaatacgaaaattagccgggtatgcctgtaatcccagccacttgggagtcagaggcacgagaatcacttgaaaccaggaagtggaggttgcggtgagccaagattatgccactgcactccagaatgagactctgtctcaaaaaaaaaaaaaaaagtaaaatgaaacaagtgaaattaattttaatattttatttatgtcaatatatccaaaatatcatttcaacatgtaatcaatataaaaattattagtgaggcattttccactctttggtactaagtttttgaaacccatcgtgtatttacaccaatagcacgcctcagtttggactcgccaggtttcaggggcttgacagtcacacataaccactggctaccctaccagacagtgcagctacagaaactctggtttttctacgacagtttggacatccattctgtggcaggttttaaaatgtgaaatcaggccaggtgcggtgactcacacctaaaatcccagcactttgggaggcccaactgggcggatcacgaggtcaggagttcaacaccagcctgaccaacatggtgaaaccccgtctctgctaaaaatacaaaaattaggccgggtgcagtggctcacgccagtaatcccagcactttgggaggccaaggcaggcagatcacttgaggccggcagttcgagaccagcctgaccaacatggagaaaccccatcactactaaaaaatataaaattagctgggcgtggtggcgcatgcctctagtcccagctacttgggaggctgaggcaggagaatcacttgaatctgggaggcggaggttgcggtgagctgagatcgtgccattgcactccagcctgggcaacaagagtgaaactctgtctcagaaaaaaaaaaaaaaaaaacaaaaatacaaagattagccaggtgtggtggcgtgcgcgtgtagtcccagctactcaggaggctgaggcaggagcatcgcttgaacccaggaggtggaggttgcagtgatccgaggtggtgccactgcacttcagcctgggtgacaaagcaagactccatctcaaaaaaaaaaagtgaaatcggtgggtaacaaatacaaaataaacgttgggcagtccaaacgaaacacacctgcctggggccatcgtggcctgcagagcactagttcacaaaccggacgaaaggatatgagatgtggggaatcaaatttgggttccattagtccttttttggaggcttcctgtgtggctggccctgtacctggaggtgtagaaataactatgtggtcctgctgggtatagagagaaaacagcagcagtgcagtgagacaggaagtgttctgacatggaaatgagaggactcagcactagacgtccctctggataagcatgggtgtgtcacttactgtctctgggcccaagttgtattggctataaaactaaataattagacagattttttttttttttaaagacaggatctctgttgcccaggctggagtgcagcagagtcatcatggctcactgcagcctcaacttcctgggctcaagcaatcttcccacctcagcctcctgagtagctgggactataggtaaaggccaccatgtccagttagttttttgttttttatttatttttttttttgagatggagtctcactctgtcacccaggctggagtgcaatggctcggtctcggctcactgcaacctctgcctcccaggttcaagtgattctcctgcctcagcctcctgaatagctgggactacaggcacatgccaccacacccagctaatttttgtattgtatagtagagacggggtttcaccttgttacccaggatggtctcgatctcctgaactcgtgatccgccagcctcggcctcccaaagtgctgcgattacaggcataagccaccgtgcctggcctttttttttttttttaaagagagtgtctcactctgttg[133 bp omitted]attcaaagagatgccggccgggtgcggtggctcacgactataatcccagcactttgggaggccaaggcgggtggaacacctgaagtcaggagttcaagaccagcctggcc[220 bp omitted]gaggcagagaattgcttgagcccaggaggcggaggttgcaatgagctgagattgcgccactgtactccagcctggaccacggagcgagactctgtcaaaaaaaaaaaaaaagagagatgccttggggctgggcacggtggctcacgcctgaaatcccagcactttgcggggctgaggcaggaggatcacttgaagtcaggagtgtttgagaccagcctggccaacatggtgaaatcccatctctaccaaaaaatacaaaaattaggccgggcgcggtggctcacacctgtaatcccagcactttggggggctgaggcaggtggatcacctgaggttgggagttcaagaccagcctggccaacatagtaaaaccccgtctctaaaatacaaaaattagctgggcgtggtggcgggcacctgtagtcccagctacttgggaggctgaggcaggagaattgcttgaacccaggaggcggaggttgcagtgtggtgagattgcaccactgcactccagcctgggcaatagagggagactgtctcaaaaaaaaaaaaaaaattagccaggtgtgatggtacacgcctgtagtcccagctattctgcaggctgaggtaggaaaatcacttgaaccaaggaggcggaagttgcagtgagagaagatcgcgccacagcattccagcctgggagagtgagacctgtctccaaaaaaaaaaaaaaaaaaaaaaagaggtgccttgggctgagcaggcagcaacacaacccccttccccagtcaaccccagcgagcgagcagccccgctcctgtgttttccatatcgggcttccaggcacaaatctaaacagaaggtcccttgacttaagagaaagaaacaaaaaaccggctgaaaaaccacacagcgttggttaaacacacaagctctggcatcacgaagtccaggtgcaaagcccacctttgccactcacccctctgaacctgtttcctcatccacaaagtgccccctctgtagggatgctgtgagggttgcaggagttcatctatgtaacacacagtacctggcacatatcaagtgctcaggaaacgccagctccctgcctcctcaggcttccagagccagcctccagggaagctgcagacagttaggaaggtcttagaggacatctaggaagtttgacctagtcaagggtcaaaaatccaaaagccaacaacagccaggcaggtaacgtaagtgaagaaaataggccaggtgtgaggccaatctggagagagacaaggaaaatatttcactttcctcttaacttcgcaaacaaacaaaaataaccacacggcatcagcccaataataaatgtaacaagcctgcagccaagtcctggggactgtggtgaaaagagctgcgtcccatccattcagatccagccatctgttgccacccagaaatgaggacccagcattgttagactgatggattttttttttcaagagaagccagaaatgtgaaaatctggtttttaaaggctagcgacccattctctttttttaaggaaacagaatgcctcaacaaaaaatgtcaagtgagggtaggacgggggctgcccatgtgtggtccctgacatacatgctctttttttttttttgagatggagtctcactctgttgcccaggttggagtacagtggtgtgatctcggctcactgaaatattcgcctcctgggttcatgcaattttcctgcctca[132 bp omitted]cgcctcagcctcccaaagtgctgggattacaggcatgagccaccatgcccagccaattctcctgaaggtcctctgcaaccctgagggtttggagaaccatcagacaagttctgtgccaaggtaagaagactcttcaagattctctccaaaacctcttcccagcagcacggcgaggaactgcacagctgagagtcttgggagacccagtttctcctcttcctgctcctcctaggcctcgtcgcctacagatagtcaataaggcaaaagcagaagcagaaagaggggcgggggcgggaccccatacacaccagggacagagtggcaaggagcagcaaaagaaaggtttcattttcttctgtttatttcaagagaacaaagattcaaccatcagttctgtacaaaaacatggtgtgagagccatgggatcctcgggccagcccccttcccgcacttgagccccgggcccccctaatttgccaaaaaaccaggagaagaccaaaaaattcaaactctggggaaaaaaattactatgaaaaaaaatcaggggagaccttcctgggcctccctttctccctatccccaatctagaaatttagtgggggtcgcggttcatggccatggcaggaggtggggcagatgggtgtcggcagatttagtgtttggcaaccagtggggctgggggtgggatctgggagggagccgaggggcctggggaagggaaaagatcttggaccctgccccggcccataggacactcaaaaacactttataaaaattggggccacagagtagaagaaaaacgagtcatcagaatcaaaaactaaagagtggaaagatttttttttcttgtctaaaaggcaaaaaactacaaacagcccaagtcctgagctccccaagacctggatcctccactgtccccctgaaacccggcaggaggcgggatggggagcacaagaggtgggttcttaaaaaagtcacccctggatgggaaagctcttcatcttctgccgccttcctctgcctcccgctgctgccgaggagagagatggagaggaccggggctatgccggcaaactcaacttcttcccctttaggactgtgaggagagaaaacagggagggcattaccgctggggcccctgcagggaggggacagcctcccacagccagagcagggcaggcacgctagatgggcagatccacagggagggaggtcccccaggactcacagatacattcctggtttctttccttcctaccctttctcactactggcaattttctttctttctttttttgagacaaggtcccactctgtagcccaggctggagtgcagtggcatagtcacagctccatgcagccttgacctcctcaagcaattctcccacctcagcctcccaaggagctgggaccacaggcgtgcaccaccatgcccagctaatttttttatttttttattttttatagtgacagggtcttgctatgttgctctggaactcctaggcttaagaaatctccctgcctcagtctcccaaagtgctgggattacaggtatgagccaccatgcccaactaattctttctttacttgttcattcaccatctcccccaccagaataaaagggaaatggaggcctttgtctatcttttctcctcctaatgtatccccagagcctagcacctggctggggacatagaaagtactcaatacatttgttgcatgaataaatgaatgaatttcagtgggctgagtccctgccctgcctggcctacgctccaagtgacatgggggctaaggacagaaactccttagcccttagggaggcagaggctaacggtctgaattcctaggaggatggtaggcctgccaccccagaaacccggcgaagaaatgctcccttctttgcataatacaggggtaaggagaccccagtccccagggagggcaggagctgcagaaataggaggttcccttccagccgtcccacattccagctacctttggtgatatagaggtagaagaaatcgcagtagaggactgtctggaccaggcctgccacaatggcgatgaggtcgaagaagccctcgaaatggtagcgccagatccagttgaagagatagagcgtgcggtaaacgcctagcgcaaacaagtagtggctggtgatggtctccgcctcgccggtcttgctcaccatgaacagctgcggcaagatggccactgactccaggtagatggagaaggtccagaggatctgcagagaggccggggacatgatgaggtgggaggggacagggcgggagaaaaggcagaggacaacattgcagttacaggtgccgcgaaggtggagagaaggaaggtgatccaggtgctgccaagtgccagacacagttctgcccgagttactggtacctctgatttaatcatcaccatggcccggcgaggagatcctatgattagcacacttattctacagatgaggaaactgacaccagagaaggtaagatactcgcccaagaccatgtagccagcaagcagcagagcaatgattcgaaccaaggattcgcagtccgttctcatgaacactttgcaattgcgcctctctgaaaggcaggctgggttggaatcttgccttggaaatttcccttcctttttctttttcttttttttttttttgagatggagtatcactctgtcacccaggctggagtgccatggggtgatctcggctcactgcaacctctgcctcttgggttcaagcgtttctcctgcctcagcctcctgagtagctgggattacaggtgcccaccaccacacccggctaatttttgtatttgtagtagagacagggttttgccttgttggccaggctggtctcgaactcctgacctcaggtggtctgcctgccttggcctcccaaagtgctgggattacaggcatgagccaccgtgccgggcccacatgccatttcttgtggcaggctgcatatgctgttcccacagcaggaaaagctcttcccctacactgtcacacatctgcctcctccgtattctcccagcctcagctcattagtcacctcccgagagggaccctccctggccatccttcccccaggactgtcacatcaccccatcttatctccttcctggccactcgcaccagcaattgagctctgtgagggctgggatcctacttcttgttcaccccgtggccctagcacctagcacagttcctgaatgagtgaggaaatgggagttagcatctataaaggggtccccatgtgctcagcacaggccaccatttagggagcactgacaaccatcattcatgagcaggacaggacatcatgggacagggaagaagacatctgccagccccctttcagtccccagctccctgaaagtgccacctggggtgatctgtgatctgcagacacactgaaacctcagagagcaaagccaggtggcaggtgtggctccttggttgtcttggtttgtggaaggaaggtggggggcaccaggacctattcataacaactcatgcttttctagcatttacgacatccaaggcatcgctccttagggtgttaactggcctgagccttaaccccatgaggtaggtactgttgtcattcccattctacagatgaggaaactgaggcccaaaggataagaaacgtgtccagattcccactgaagcacgtagagtccaggacctgctcccagaatcatccagaatcctccagggaggctctcgtgaagccaggttagttgatgctgctgggaaacgaacccattaaattgatgcccattcaactctcacccctggggttgcccttagggaacagagtcaccgtttaaagagagacagaaggtctgttgctttttttttttttttttcctgaggccgagtttcactcttgtcacccaggctggagtgcagtggcgcgatctcggctcactgcaaacctccacctcacgggttcaagtgattctcctgccttaacctcccaagtggctggaattataggcactcaccaccacgccctgctaatttttgtatttttttagtaaagacagggtttcaccatgttggccaggctggtcttgaactcctcacctcaagtgatccacccacctcaccctcccaaagtgctgggatcacaggcgtgagccactgcgcccagtcttgcatttttatctattccatgctgtttgaattttttttttttttttttgagatggcgtcttgctctgtcacccaggctggagtacagtagcacgatctcagctcactgcaacctctgctgcccgggttcaagtgattctcctgcctcagcttcccgagtagctgggattacaggtgcatgccaccatgcccggctaatttttgtatttttaatagacagggggtttcagcatcttggccaggctggtcttgaacccctgacctcgtgatccacgatccacctgtctcagcctcccaaagtgctgggattcaggcgtgagccactgcgcccagcctgatgtctgaatttttaaagaatattttccttaggtcaggcacggcagctcacacctgtaatcccagcactttggaaggctgaggcaggtggatcacttgaggccaggagttcaagatcaccctggtcaacatagcaaaaccctgtctctcctaaaaatacaaaaaaattttacctgggtgtggtggctcatgcctgtaatcccagctactcgggacgctgaggcacgagaattgcttgaacctgggaggcagaggttgcagtgagcagagatcgtgccactgcactccagtctgggtgacacagcaagacttaaaaaaaaaaaaaaaaaaaagacgcctgggttctggtctggcctcctccaccttcagcaagccgcactacctccctcagcctcagtctccccatcttcaaaatgggtctagtaatccctagtcaacagggcagttatgagctaagtcaagggcttggataagtgatccaagcaaggtggtaacaatatgtttgcaaagtccagggcctggagccaagcccaggattcccaccacagcatgatgcagcctccctctgatatctctgacccatgggccaaagtcaccctctgttggatttgtctggcctatacagtgcttttagagatatgttttgaaggccaggcacggtggctcatgcctgtaatcctagcactttgggaagctgagatgggagaattgcttaagaccaggagttcaagaccagcctgtcaacatggtgaaaccccatctctactagaaacacaaaaattagccaggcgtggtggcaagcacctgtaatcccagctactcgggaggctgaggcaggagaaacgcttgacctgggaggcagaggttgcagtgagccaagatcgtgccactgcactccagcctgggcgacagaatgagagtccatctcaaaaaagaaaaaaaaaaaaaaaaaagaaatatagtctgaatctgtggctaaaattttaaaatgagacatcttgcctgaaaactcctgaattatggcttctgttgaaaagatcagcacatctggccacccaggcctatcttcctataaggcaggagtgggcacaggtaagaaaaggttaccctgaatttatgattcctgccaggccccaggaggcaagagatcgcaaacttagcactggctctcgcaaaattcctcccaggagtttgtacaggtcccagcaaaacaccatggaataaaaatcattaacagcgaacatttaaaagtaaaagtatcagagatgggactaaacacttcagtcattgaacattgattgacacagcacttcctacctcatcccagatactgtgctttattaataccaacctctcatttgaaccctatgacataggaactgattatctccattttacagatgaggaaactgaggcacagggtagttatgtgatttgcccagaatcccatagctgctacatggtagaggcagggtccaaatccttacactctgattctagagtctttatgtgttttgacaccaggcagtgctgcaaagtctcagtaaattctcacaatgacctgatcacaactttacaaatgtggaaaccgaggtacagagaggtcaagtcacatgcacgggatcatgctaatagaaactagcagatttggagccgggcgcggtggctcatgcctgtaatcccagcactttgggaggctgaggagagtggatcacctgaggtcaggaattcgagaccagcctggccaatatgttgaaaccctgtctctactaaaaatacaaaaaataacctggcttggtggtgggcatctgcaatctcagctactcgggaggctgaggcaggagaatcgcttgaacctgggaggtggaggttgcagtgagccagaatcatgccactgcctccagtctgggcaaccgagcgagactttgtcgaaagagaaaggaaaaaagaaagaaaggaagaaaaggaagaaaaggaagaaaggaagaaaggaaggaaagaagaaagaaaggaaagaaaggaagaaagaaagaaaggaaagaaagagaaagaaaggaaggaaggaaggaggaaaggaagaaaggaaggaggaaaggaagaaggaaaggaagaaagaaaggaaggaaggaagaaagaaaggaaggaagaaaggaagaaaggaaagaaagaaagaaagaaggaaagaaagaaagaaaa[138 bp omitted]atgtgaaaccctgtctggactaaaaatacaaaaattagcagagcatggtgatgtgcacctgtcttcccaactactcgggaggctgaggtaggataattgcttgaacctgggaggcgggggttgcagtgagccgagatcatgccactgcactccagtctgggcaacagagcgagactttgtctccagaaaaaaaagaatccctaagcctcagtttcctcatctgtaaagtggggctgctgagaaaagtaagtaggtgaaatgcttagggtagtgactgacacatagcgagtcttgctgctgttgtgttaatttcctctgaccccagagcccatgcactgaacttatgcatcctaaaataaggcagtttgggcacaccctgcagaaggaagcctgtgagagggtctcctgtcatagctactctgccacaaccatccccccaaataaggagtcacagcaaggcgcctacctccagaggggtgaagtcatgattgaccaggaacgccagaatggctgtgggaacgaccaggaactccactctgaacgtgtcatggttcccatcgtaagtagctttgaacttgctataaatcaaccagaccgtggtgaaggagcaggctatgtagaccacctgaggagggggatgatgagaaggggcctcaactcacaggcctgtgccccagtaggctcagagcccggagtccaggcccctccctcagacgcaggagtccagacccccaacccctcctccctcagacccaggagtccaagcccccagcccctcctccctcagacccaggagtccaggcccccaacccctcctccctcagatccaggagtccaagcccccagcccctcctccctcagacccaggagtccaggcccccaacccctcctccctcagaccctggagtccaggcccccagcccctcctccctcagacccaggagtccagggccccattccctcctccctcagatccaggagtccaggcccagcccctcctccctcagacccaagagtccaggcccagcccctcctccctcagacccaggagtccaggccccagtcccttcctccctcagacccaaaagtccaggcccccggcccctcctccctcagacccaggagtccagacccccaacccctcctccctcagacccaggagtccaggcctcagtcccttcttccctcagacccaagagtccaggcccccggcccctcctccctcagacccaggagtccaggcccccagcccctcctccctcagacctaggagtctgggacccacacccggctcctctgcctcagtgggggccagagaggtggggtggagcctctaccttcatacacgtgttgtagagtgagatgtagttggtgaagaggtccagatatcgggcagtgaacaccacagcaaacaggacctggctcttccctgaaattcctgtggtccagagacagagaaagagagagagagagagacagagagagagagagagacagacagacagacagacagacagaaggagagaggaagctgggggtgggctgcatgggcaataaactaaggcagggcgcccgggaccagcctggaggcagctctggagtgcagctgtccccggaggcctccccagcccgccccgcctgagcagggccctttcccacggaccacagccagggggcagcccaggcccccgaagctactccagcccgaggctccgtcccagactaggcctcatggctacccctggcccctcagggtcctcccgcagtctggacctgaggtgaggcctagggaggaccttccctgacctcaggccccggatccggtcacctccctcccgttcccttcctggccgccacggtccacgtcaccaactcacagccacctccccgcctgccatggttccctgttcccggtccatgaaccctcgggctgcccagattggggctgggggtggctgaattgggggcctaaagccattcacatgaaactgtatgcacccccgccagtctggggaagggagctgatcccctggagacccagaacctagaagagagatccccagcaagcagtgggggtggaacctgtgcccctagtgcccccaaacccttcctgagtcctgcgacgtcccccaacccccgcccgcaatctctctccttcgccagccctggtgggcctctcaccggcgcacgagcgggacttccagattttgagcagtagcaagatgatggcgaggaggtgggagaggtctcccaggaatcggaagagattcatggctggggaaccctggcagggctgagcgggagggaggcaggctggcgggggggtgccccccgaggctgctggtctgaacgggtagctgggctggggggacggaagagggaccctaggtgcgctccgctccggggaggggactttgggagggggagcaaaggctggagctggcggcggagctggagccgggaagagggaggagagcgagagggggaggagtccgggaggagaggctccgcccccgagggcggggcctggatccccggcgccccctatcgcccacctcctgctttgccgtggcggcgctaaacgcacccccaaagctgccccataggaacttgggagggtcgcagggttcggaaagtgccaaatccagcaccggttcgcccaggcagtctgtgtctctggaagagacgcagtccagtacaccagcctcagcccttgcagggatgtagagactgccctctgagcttgaaaaatcctgcagggacccggaggctcagctgctagcttttgcagctttcaggcactctaactccaatcccccagaagacaagaaagataccccacctacttcctcccctagacccaggactcaaggccccagcccgttcgtcaaacccagaagtctgggtccccagcccctcctccctcagacccaggagtccagacccccagcctctcctccctcagacccagaagtccagacccccagcccctcctccctcagatccaggagtccaggcccagctcctcctcgctcagacccaggagtccaggcccccagcctcctccctcagacccaggagtccaggcccccagcctcctccctcagacccaggactccaggcccccagaccctcctcccccagatccaggagtccaggcccccagcccttcctccctcagacccaggagtccagacccccagcacctcctccctcagacccaggagtccagatccccagcccctcctccctcagacccaggggtccagggccccagcccctcctccctcagacccaggggtccagggccccagcccctcctccctcagacccaggggtccagggccccagcccctcctccctcagacccaggagttcagggccccagcccttttccctcctaggacgctgttccttggaacttagggtcccacccccaccatcttatggatcaaacatcctaaccttaagaatctagatctacagtttctccctttacgacccacagatttaggccctgattctcttctttttcaggaatgtgcacctcaccctgttctcccagaccttgaggatgaaggaaacaggagcctcacccaggaggctcaaggccaaaactctgacccaaactacctcaggagcccctggccctggcttcccccctgctccagagtttctgccctgcccacacacacacaccctcttccaccctcagaggccccggtgtcctgccccacgctctaccccagagccccacgggtggctttataaaagtgccgggcccagccctctagcaggaggggaatgctgggcatctgggtgtgggacccccggggaacagcctgtggtctggactcctgcatctatgaggggacagacgtggcttcccttccggatgatggggtacccacagatgatggaggccagggtccctcaataaaagaaggggtgcaggcgtgttgatttcttcagagggctggaaggacggggtgcccaagggtgacatccacgagtcttgggtccctgagggtggcttgtacgggggagagtcgggatgactgagtccttaaaagagactccgacttggaggcggtccccaaattcctgggtcccagtagagaaggggactcctgggtctgagggaggaggggctggggggtgggactcctgggaccagggtcgagacctggttttcaggcctggccttctggggcaataaaagccacagcttgggtcttagtgtggcgaacactgaagtcagggaaaggcctcctgtttccagagcctcaaggcagggcgggggcagagggcagcaacccccagccctggagtctagctctgaagctggtgtctccataccgggttctgagtccctgcctgcctgtccccagcctgacttcttcctccctttttattttcagcccctcactcccttgtcccaggaggaaggcagaggctggtagctaggggtggggggcggccccctccccaagcctggcaggagaaggggtccccagggaggccaggagggggggctgtgggtctcccggcagtggcagacggggactgaatgttaatcgcatcccgagtgagtgtgtgtgtgcgagaacacagcgagtgtgtgagtccctcccgctccagctcctccaagccgcggccgccgccgccaccctcgcccgcagcctcccgcagcctccctcggccaccggtgcctgctgggggtgttgcctgggtaggtcggcccggcccccaggggtctctcgagcgtctgccatctgcccggtgaggatctgtgtgtccgggtgtctggggctggctggtggagggggggtgtgtctgtaagcgctgcggcggcggagggagggaggggtctgtctgtctgtaccgaccctgagctgcctgcctgggtgtcgtggggctcccgctccttccccccggcccccccaaacccagatggatggtgtgtacctgggttctgtgcctcctgcctgcgtccggccaggcgtctgggcgtccccggctgcctgtgtcctcctgtctgtccaaacagcccctatcagcagtggcagcctggcccccattagaccccccactctgtgtgtgtgtgtctgtgtgtgtgtccctcctcaagctctgggggtgttgagggggaatcccagggaagtgagatcgtgcgtgtgtgcgtgagtgtatgtgtgtttctgcctgtgtttgagagtgggggagtcaagggggggtctagaggtggccaagcgaggaaggggcaagcagttccccaagcaggcaatctcccgctcctcacacgcacacaccagccactagcttcagaggtgacccagacagacagatagacacagacgctggaagggggggtgggggggctgagggcacaaagcgggggtgcgagtgagccagggagaggcgggactggacacatggaaaggggggaggagccggggctgaagcggcagaggggggcaccccgggtgggcggaggggggatccccacggggtcggggcggcaagaggacaccccgacagcctctgcaatgtccggggcccaacttccagagcaacatgtgtagccacgtcctcgcctagtccaggtggccgcaaccttgggggagagacagggcaggacaggaccaaggaagaggaaggagagacggagccagggacagacaggaggtccgggctgccgctgctgccgccaccaccactgccgccgccccggggcctgccccccgacatcggctctctgagccctcctcggaatcttggggtcgctggacgccgggttccggtcctggcccccccgccatccccccaacagaacagggtcatgaaaaggtaaggcggggacaggggatgcagggatggtggtgggaatgtggacccccaaatctaggacagaggaagttggcaagaagcctcgtggagggagggggtttgaacggtgggcaggggtcttgacccccacctagctcccctgtccctcagggactctcctccaccctctctctctccctctctgagcccctttttcctgagtccctacacctcagacctttcacgcccccatttctctgacacttggctccctctccccatccccacatacctgatgccccatatccctgtgcctccatctctctatctcaccttctccctgtacccccctccctgcatcagtccccccatcgcgagccggtcctctccctctctcctctcgctctcccctcccatgtcagagctatgagtctgctattaatacccccgccaaggaccttgagggcatccaggcccccagcacccctcgccccaagctcccaccccttcctcaaggttctggaacacccttccagcctcttccaagcatcaggattcgggtggggagagaccgatgttgtgtgtgtgtgttgggaggtgaggggggaggaaacgggatgccgtctgcagcacaactcgaggttgtggggggagctgttgatcgaagtggccgctcctctcttctctgttggatgctgtggggggcaatgaagacagggacaccctaggaatttctggcaccctcctcctcctccccgcttggggacaggctgtgctatgtacaggatctaagtggggtgactagggaggccagagctcggtgggggggcacccaggatgttgggaaggatagggtttgaaaccaaaaggggatccttaagggaggacaggagccggaacccggactcctgggtccttgggggaagaggggagctggggacctggactcttggttcctgcagggagaggaggctgggcactggagttccagagtcttggggcaggaggggcctggcctcctgggtcctgggaaagaacaggaccgaatgcccagactcccaaggcctgggggaggaaggggctgccagaaggactcctgggtctttacgggaggaggtaggggatagcgcttccgtctgaggaaggcaggctgggagctcagtctcctgagtccctgacagggcaggagatgagtgttggggactttagccctatgcagatggaagtggaaacggaggctcatgaggaggtagagatggaggcggggggagcggggggttgtccagaggctggactctgtgatccctgagggcgtgggttctgggggttgggccttcagagtcctggaggactggggatgcccctcctcaggccctggagtgggggaggctgctctccctaatccctgtggttaggaactgagcatgcagcccccgtgagaagggtggggccgggggctgccctcctgggcctcagtagggagtgggacgcggggtccctaagagcagaagccaggtaggggtgggtctgggagaggcagaggaggggctggagggtgagcagccactgggaatggaggggagcgtgagtgttaaccccgcgggggccaggccacagctgtgggttattttggggcggagtgggggggttattctgagcgctgattgagccagctgcttggggaagggcaatggaaaggaggagcgaagagaagccaggatcggggagggatgggcatactaggagcccccaaccccttccctggggagacaggggcccgagatctctgggaaggtgaggtggtgggcagaggggacgggctgtggcctcgaggcaggggaggggtggtggacctttcccccgccctggctgtctgtggggtggacgaggcctgcgctaccatggcaaccagacaggagcatgacagccaggagagaacccttccttgtctggaccctcaccccttctggaagcccctagtgcggactccagtccttctctgggaaccaggagtccagactcccagtgccctcctccctcagtcccaggcaggacccaggagcctggctcccagcccaaccaccccaggcggctagtattcaacagggggcacaggaagagaggctgtatttcctctaatttaccaaattgctctgggctgggtgccagggacccccacacccaccccacccagctctccacagctgtgccccccaaccccacatcccagatggggccatgactcccttgctttgagaatgaggggatggggacaggactaaggggacaaaatgggttaggggttgtggtcagggtgaggagtaaggtcatgtggggattttctctccttggggtgccccactaatttctctctttctctccccacacacctgaccccttttccctctcattttttctctcccttttcctcccttttatttctgctccctcctgccactcgccttccccgccttactttcatgtctgtactgggcacctccctggtgggggtcccgatcttggccttgcttcgctatttctgtcctcctgttttcgctccgctctgcctgcctccctcaatctcaattgtttccccatcctttatgtgcgcgtgtctcttggtggccttggggtctctgtctccctcttcctgccttgctgtcttcttctctgtccaactttcttgcctcgcttatctctcccgccttcctgcatctcttcccgcctctatcatcctctccctgggcctccctcattcctgtttctgtcactccgtcctctctctctccgtcttctccccgtctctgctgcttccgtctctctccttcttcctgccgctctttccctccccgtctccctgggcctctctctgctcctatcttgatcccatctctgtgggtgtccccatccccaccttgtctatcttcctctctctcccctcttacctctgtatcttcccctgaccccattatccaccctcgtctttgcgtctcccccaatcccatactccacttcttcctatctctgtctcgccctatctctgcgtctctccctgtttcacctcttcctctggtgtttcttccccacctctcccttccacctccctctgctgtgtctgtctctccctctgtctctgcctgtctctcctccatctctctctctccgtctccccctctctctcccctccatctctctctacctctgcccgtctctccctctgtctctcctccatttctctctccctctgtctctctcccttccatctctctcgtcctccgttcctgtctctccctctgttccatcaccccgaccgctccctgtcctccccatctcggcgcctgtccctcgctgcatctcctcctctgtgcgtctctttatctcgtctccctgtccctgcgtctcccgtctgtgcctccctctcctccccgtctctcccggcccgggcgctcagaggccgcccggcggggcccgcaggcgatgcgcggcgccggtggcccccgcggccctcggggccccgctaagatgctgctgctgctggcgctggcctgcgccagcccgttcccggaggaggcgccggggccgggcggggccggtgggcccggcggcggcctcggcggggcgcggccgctcaacgtggcgctcgtgttctcggggcccgcgtacgcggccgaggcggcacgcctgggcccggccgtggcggcggcggtgcgcagcccgggcctagacgtgcggcccgtggcgctggtgctcaacggctcggacccgcgcagcctcgtgctgcagctctgcgacctgctgtcggggttgcgcgtgcacggcgtggtcttcgaagacgactcgcgcgcgcccgccgtcgcgcccatcctcgacttcctgtcggcgcagacctcgctgcccatcgtggccgtgcacggcggcgccgcgctcgtgctcacgcccaaggtgcgcgcgaccggggcggggcggggccacaggaggggcggggacagccgctgaggggcgggactgggacagccagcgggggcggggcctagagggggcggggactgtcctgtgggtccgagtctgggacaaggtgggcccagatggtaggcagggcttagggctagattagaggcggggctgacttggagggggctggtctatagggtaagctgggcctttagggtcagaaagaggccagtcctcgatgatcagagtatagggaggacgtgggcccattcattgcaggtaagggtctgtagtaaaggcgagtcgagggaagggttaggggctgggaacgaaaagggactagccccaaatggcaaaatctgagggaggggtgggacctaggatcagcacaggaagaagtcagttgaaaaggaatgggcctgggcgcggtggctcacgcctgtaatcccagcgctttggaaagccgaggccggcggatcacttgaggtcacaggagtttgagaccagcctggccaacatggtgaaaccccgtctctactaaatatacaaaaattagccgggcgttgtggcgggcgcctgtaatcccaactactcgggagggtgaggcaagagaattgcttgaatccgggaggcggaggctgcggtgagccgagatcgtgccactgcactccagcctgggcgacacagtgagactctgtccaaaagaaaaagaaaaggaatggagttcagaaagaaaggggcgaagtctagtggagaggtggcagctaggaagtatcagaggtatcaggtaccaaggacagagtttggggaggcgttcggccggtagagcatagggtctagaagtcagccagggatggaggagccatcttctaagtggaagtcggaaaagaggaagagtcattagagagaggaggacgggcaaggggtagaaccaggaagcaaggaattgagatttggtgcgaggccagtcagggaaggagtgagtcagaaaagggggcggggctagccagttgggggcggggccagcgaggggcggggcctaagcactctaataaaggggtgggtctagggaggaagccggtcctgagagtagggtttgagaaggggcataccccgctgtgaggtgtggaaagcgagagtccagaggatgggcaggaggatgaaggcttatggtggaggccgacccagccaatgacagatcaaagccaggagcctgctgggaagggatggtagaggctggagctggccagagcctggagaaaggcctgactcccaagggcacagaaggggccagttgtagcggacctctggtagagaaggagagaattggaccaagcctgctctgtggattgagaatgggtcagctaggaggtggggcctgagaaggggcggggcctctccagaggtggggccagcgcaacccagaggtggagcttcattcaatctgcccattccctgctgtgcgggcctgtggctgtgtgactgcatcactgttgtatgcagaggctcgtagtcctctcctgtccagagcattctgggaaggacctctgtccaactttcttgttctccttggcatggtacttttcagagatttgtaggtagatgccctgggaggcgaacttatttcttaactgccacttccaaggcatactcaaaagacgtgatccctcgtgccttcattgctgctgagaagtgtggtcctctctgtttcattgtccgctgggcactgcggtcggctcagtgtacgcccatagcattctgggaaatgtagtccccgtgctgcccctggatggaagaaagaatgatcttcacagctccatctgtgccccactgaatgctgggaatgtggtcccctcagcacacctccacctgctgaaggaagaggttc[135 bp omitted]accccatctctgctgaaaatatgaaaattagccgggcatggtggcgcatgcctgtaatcccagctactcaggaggctgaggcaggagtaatcgcttgaacctgggaggcggaggttgcagtgagccgagattgcagtgagccgagatcttgccactgcactccagcctgggggacagagtgagactgttctcaaaaaaaaaaaaaaaacaataaacaaaaagaactcattccctcaggacaactgcagtatcccctgtgcgcctagggagaaagcccacttgctgttctcattgcattacaggaagatttattgagagctgattctgtgccagggctgttttaattcctagggaatacagttctagagggggggggaaaaaaagagagggagacaaggtccctgccttatagagcttgcattttaatggtgagacagacaaaaccagtaacagtaaaatccggctgtcctggaggaaatcaacacaggatgttgtaatgactgaggatggagtttcaatagatggcagtcaggggaggcctccctgaggcggtgacacctgagctggaggtgtcaggtggaggtctggcatggaggaggtagggaaaagtgtccccaggagaggcaacaacaaaggacaaagcccttgaagcaggaaggagcttgatgtatttgaggaagagcaagaagggagtgtggctggagcccactgggggattggggtggcaggagatgaggtcagagaagcaacgggggccagttcacgcagggccttggggccacggtgaggactttggctttgattctgaggtagaatcactggaaggttttcaattgagaagggatgtgatccaattaatattttgaaacaatcactctggctgctgtttggagaatagactggaagatgcaagattgaaaacaaagataggctgggcgcagtggctcatgcctggaatcccaccactttgggaggccaaggcgggtggatcacttgaggtgaggagtttgataccagcctggccaacatggtgaaacctccctctactaaaaatacaaaaatgagcttggcatggtggtgcatgcatgtaatcccagctacttgggaggctgaggcaggagaattgcttgaactcaggaggtggaggttgcagtgaggcgagatctcgccactgcattccagcctggacaacagagcgaaacttgaaagaaagagagaaagagaaggaaagaaagaaagaaagaaagaaagaaagaaagaaagaaagaaagaaagaaagagagaaaagaaaacagagatgggtgggaaagttgtagatagctgggcaagaaagggtgacaatgagagttgtgacagtgatggcagtgaggagtggacaactggagctatctttgaacgtagagctaagaagacttggagatggctgaatgtgtgagggaaagaaagggaaaggatgatttaggtttggggcctgagcatcagggtgaatgagagagagaggaaaaaaaaggcagct[212 bp omitted]gaggcaggagaatggcgtgaacccgggaagcggagctttcagtgagccgagattgcgccactgcggtccgcagtccggcctgggcgacagagcaagactccgtctcaaaaaaaaaaaaaaaaaaaaaaaagattctttactcctttacgagagagagagagagagagagagagagagagagagagagaatagggaacagtcttgagataggggaaagatcgagcaatctgtttttgacatgctaattttgagacaccttggaaatccaagaggagatattgaataaaaaggaggataggggccaggcatggtggctcacacctgtaatcccagcactttgggaagccgaggcaggcagatcacttgagttcagaagttcgagaccagcttggccaacatggtgaaaccctgtctctactaaaaatacaaaaattagctgggtgtggtggcatgtgcctgtaatcccagctactcagaaggctgaggcaggagaattgcttgaacccaggaggcagaggt[137 bp omitted]acaggagccattaacatatccagcactgttcaataaaactttcagcaaagatgaagctgttctatagctgctctgtccgatttgaaagccacaagccacatgtggctgttgagtacttgacaagtggttagtgcacccagaaaactaagttttaaattctatttaacatttttttcctctggtccttgattcaggataaattttatttaattttaatttgaatagttatgagtggctaacagccaccctattggatagcatgggagacagtatttaaactcatgggcctggttgagatcaccagggagagaggaatagagaagagaacagtaaggcactcctagtgtttagaatttagaattctggctgaggaagaagggccagcaaaggaggcagaggaagaggtgacagagaggtaggaggaaaaccaaagaagggaaaggacactctgcaaagcttcttccagtagggaaataccatcagcaccctcattgcatgctgggagatgtagtctcctcactgccttcagggaaccagtccctctcagtggctgctgggggctgtagttcccttaccggatgctggttgtattaatgacagtgatgttagctgctggaacggatgaacccccaaatctcagtggatcacccaacaggaggttgtttctcattcatataaaatccaggccaggcacagtggctcacgcctgtaattccagcactttgggaggccaaagcgggtggatcatctgaggtcaggagttcaagaccagcctggccaacatggagaaaacccgtctctaccagaaatacaaaaattagttgggcgtggtggcgcacgcctatagtcccagctactcgggaggctgaggcaggagaactgcttgaacccgggaggcggatgttgcagtgagccgagattgtgccattgcactccagtctgggcaacaagagtgaaattccatctcaaaaaaaaaaaaaaaaaatccaaacaggtgttcctgattggaggtggctttcctccgtatggtgactcggggtttcaggctctcaccctcttgtagctctgtaatccccttcagaggactaagcttcaagagtaaggttttattaggctgggcacggcaggagaatcacttgaacccaggaggcggaggttgcagtgagccaagatcatgccgctgctcaccggcctgggcgacagagcaagattctgtctcaaaaaaacaaaaaacaaaaaaacaaaacaaaaaactaaggttttatggatgagtctagaataactcatcacgtggctaaacctaatccagatctagccctgtgccccaggaggaaaaggagatgggtttagtgaacctgtcgagtcagtctgccatattgggagctgtggtccccttattcattgctgagaaataaggtccccacatcggcaggcctgacatcctcctccctccctggcaggagaagggctccaccttcctgcagctgggctcttccaccgagcaacagcttcaggtcatctttgaggtgctggaggagtatgactggacgtcctttgtagccgtgaccactcgtgcccctggccaccgggccttcctgtcctacattgaggtgctgactgacggtagtctggtgggctgggagcaccgcggagcgctgacgctggaccctggggcgggcgaggccgtgctcagtgcccagctccgcagtgtcagcgcgcagatccgcctgctcttctgcgcccgagaggaggccgagcccgtgttccgcgcagctgaggaggctggcctcactggatctggctacgtctggttcatggtggggccccagctggctggaggcgggggctctggggcccctggtgagccccctcttctgccaggaggcgcccccctgcctgccgggctgtttgcagtgcgctcggctggctggcgggatgacctggctcggcgagtggcagctggcgtggccgtagtggccagaggtgcccaggccctgctgcgtgattatggtttccttcctgagctcggccacgactgtcgcgcccagaaccgcacccaccgcggcgagagtctgcataggtgagtggggctggaatgggaggggtgtgggagggctcccagagcctaactacctcagtattcactgaatgagtggctcaaatgggccacatctgctctttgagcctcagttttcttttctgtaaagtgggtgcaattgggtctcttttctgaggttaaatcaagtaatttggaaaaagcacctgagataaagtgagtgtattactatatttcatgactctaagatgcataatgtttcacattttaatgtctttgaaaacgagatgtgtcttataattgatgacttatcatggcttaattggcagcacttttgtctttctttgtggtacatcttataattgagagcattttagatttagtctaaatacctagactataaactgagcttcagtagcaaaaaagacccaacaatccagtggcccagatgaggtcgaagtttgttcctctctcacgtaacaaccctgataaggagactgctgttccatgtgatcattcagggacccaggattctcccacactgttactctggcatctctgcatggtcgaagtgggtcgtggggatgtctgaattgtagctcatgagaaggggaaaagagaggaagtggacagcaagcactttccttttgagtaagtgaggcagaaaggacacgcctcataccttactgttgagaacgtagtcatatggtcagggctggcttactggttgttgacagtggtgtccattctgattggttggacgtctattggaattagctagacgtctattctgattagctagacgcctattctgattgactagacgtccattccgataggctagacgtccattcctggctagacgtccattctgattggctagtgcctgtgcagcgccgattgctacatattttgaatattactcctgcacatggcctggccaactgcaaggaagagtgggaaatgtcagtcctagctggacaggtgtgtgcccaacttacgcactattattttagaagaggcgaacagagtttgttggaaaatagcatctccacggtaggaagctctgggagtggaaaaattggtaagtttggtgacagaacagtgaaaagagagacctttaatcctgaacgaggatggggtgaatttgggaagagatgatggttggggaagaagacctaagagagggtaattgagaactggtgacttgggaatcaggatccccgaaaaagaggatgagaaaagcatcccttcttcataaatacttactgagcacccgctaggaactagggctcatgctgggcgctgggaacatagatgaataagaccatgaacttattcttcaaagaacgcagggtcctgtaagagtggcagacagggacagggataatggcaacgcagcatgatgcttgcagtaatggaggtcatgcgggcatggcgggggcacggggaggagcactggctaagccaggagattttcggatgcatgaagcagagtctcactggagtttccttagggaaaagggggtttattggaaaaataaacacacagaggaattaaagccaggaattgaggctaagcctggggccagctactctttcagctctttctggttctttctttttttctttttctttctttctttttcctttttctttttttttttgagacggagtctcactctgtcgcccagctggagtgcgatggcgtgatctgggctcactgcaacctccacctcctgagttcaagcgattctcctgcctcagcctcctgagtagctggggttacaggcacgtgccaccatgcccggctaattttttttgtatttttagtagagatgccatgttggtcaggccagtctcgaactcctaacctcaaatgaactgcccacctcggcctcccaaagtgctgggattccagccgtgagccaccgagcccagctggttctgtctttcttattctatgctttctccctccctccctctgtccatctccttcctctctctctctctttctctttgtttctcaggcttgcctctcccagacgctgttcagttctttacccagaatttcttctccctcataacttcagctcttgctggtcacaactcatccctccagatctcatagcaaaatgtcatcccaagagaggaaatgtattagcctcagtctgccttccaaaccaggttgcacaagtcacaagtcagcctgtggagtcaggaaggtttctaggagaaggtatctgagctgtgacctgagggatgaattgctcattgattcatttattgattgaaacgccctttattgaaagtctgctatgtgccaagcattgctttaggcacagggtgtatatagtgttaaataaggtccctgctctctcagagcttacaatctgataaaagagaaatgcaatgagcaaataagtaaagaaaaggaaatatcaagcaggcaataacttctgctatgaaaatcaaactggggaatgtgataagaaatgcatagggggctatgctaggtggggtggtcaggaaaggcctttctgaataggtgaaatttggaggttaaaaaacatggataggccgggctgtggctcatgcctgtaatctcagcatttcgggaggctgaggcaggaggatcgctagaggccaggagttccaggccagcctgggtaacatagtgagaactccatctct[135 bp omitted]cctgtctctactaaaaatacaaaaaattagccaggcgtggtggcgggcgcctgtagtcccagctactcgggaggctgaggcaggagaatggcatgaacccgggaggcggagcttgcagtgagccgagatcgagccactgcactccagcctgggtgacagagtgagactccatctcaaaaaaaaaaaaaaaaaaatctgggcgtggtagtgtgtgcctgtagtcctagctacttgggaggctgacatgggaggatcacttgagccttggagatcgaggctgtaatgaactgtgatctcttcactgcagtccagcctgtgcaacaaagtgagaccctgtctctaaaataatttaaaaaattaaaatttaagaaataggtaggcaaggtgtggtggctcacacctgtaatctcagggctttgggaggctgaggtgggcggatcacttgaggtcaggagttcaagaccagcctggccaacacagggaaacaccatctctactaaaaactacaaaacttagccgggcgtggtgacaggcacctgtaatcctagctgcttgggaggctgaggcaggagaatcacttgaacctgggaggtgaaggttgcagtgagccgagaccataccactgcactccagcctcagtgacagagcaagactctgtcttaaaaaaaaaaaaaaagagagaaagaaagaaatggataaagcgaaggagccaagtattggaagatctcagtgaagggagagggaacagcaggtgcaaaggctctggggctggaactgccttgtcttagtctgttttgtgttgctatgacagaatatcataggctgggtaattataatgaatggaaatttgttggctcttggttctggaggctgggaagtccaacatcaagatgtcaccgtctgatgagggtcttctttcagcatcattacatgagggaaggcatcacatggtagaagggcaaagagaggagtgagggaagatcaagcaaacccactcctgcaaccacagcattagtccatttgtgagggtactggagccccatgacctaaatgcttcttaaagtttccacctcctaattcccaataccatcacaatggcaatggcaattaaatttcttttttttttttttttttttttgagatgaagtctcactctgttgcccaggcgggagtgcagtgatgtgatcttggctcattgcaacctccacctcctggattcaagcgattctcctgcctcagcctccgagtagctgggaccacaggtgcctgccaccacacctggctaatttttgtatttttgtagagatggggtttcactatgttggccaggctgctctcaaactcctgacctcaggtgatccacccacctcagcctcccaaagtgttgggattacgggcgtgagccactgcacctggccgtaaatttcaatatgagttttggagcggacagacatccaaatcatagcttgcctgttcggaagcctgtttgggagcctgcactgctggtgtggctagaacatagtgggcaaggggaaggaaggtatgagtagcggatggagagggttgcagggcccagcttgtgaagggcctttaggccagggggcaggggtttggacatgattcttttttttcttttttttgagatacagtctcgctctgttgccctggctggagtgcagtggcacaatcttggttcagtgcaacctcaacctccctcccgggtttaagtgattgtcctgcctcagc[214 bp omitted]ggaaatagtattccagtcaggggaaacgagcatatgcaaaaacccagaggggagagaaacttgggcagatggtgggaccacaatagttc[146 bp omitted]cccgtctctactaaaaatacacaaattagctggacatggtggtgcacgcctgtaatcccagctactcgggaggctgaggcaggagaaccgcttgaacccaggagacggaggttgcagtgagctgagatcgtgccactgcactccagcctgggcaacagagtgagactctgactcaaaaaaaaaaaaaaaaaaaaaaaagcagtcggagtgtgggtggcaccaggcctttgccttcaatgcaggttgagaggcctggatctgttccacagcactggtgagccaggggtgggttatgagcaggagacgggtggcgtgagttttgggtatagaaagacgcctctgggacctggtggggaacagactggagtagagagattggaggctggaggccaggcaggaggctgggatgagggcctaggagggctgtggggaggcacagaagaagacagggcagagagagccccaggccaggaagaaggagacttggggaccgataggctgggtagcgggagggaggaaggcggctaagagtctagtccagtgactgggtggatgacatgagagacagtcagagtacccagggtgatgttgcatagtgaagatattgaggagtccagggacacccccggccatccccagccctgggcacttctaaccagaggaagagacatttgagctcagtctttaagacacatggagttggtcaaggctgggtacagcggctcgtgccagtaatcccagcactttgggaggtcaaagcaagtagatcatctgagcttgggacatggcgaaacctcgtctccaccaaaaatacaaaaattagttgggcatggcggtgcacatttaaagtcccagcagcttcacaggaggctgaggtggaaggatcacttgagcctgtgaggcagaggttgcagtgagccaagatcacgccattgcactgcaatctgggtgacagagtgagaccccgtctcaaaataataataataataataataataataataataataataataggccggcagtggtggctcacgcctgtaatcccagaactttgggaggccgaggtgggcagatcacaaggtgaggagttcaagaccagcctgaccaacatggtgaaaccctgtctctactaaaaatacaaaattaggcaggcgcggtggtgcttgcctgtaatcccagctactcaggaggctgaggcaggagaatcgcttggacctgggaggcggaggttccagcgagctgagattgcaccattgcactccagcctaggtgacagagcaagactccatctcaataataaataaataaataaataagaagaatagttggtcaggataaggggtggtataaggtttttcaggcagagagaacagcatctgcaaagtcctagagataagaaatcacttgacatgtttgggagacaccttgaagccagtgttgatagagaaaaaaaaaaagaattttggggtgaaaagagtttgaagtttgagggtgggaactctcagagatgcggcttcagaggaaggcaaagccagaacaaaaacagactctaggggcctggcacagtgattcacacctgtaatcccactatgttgggaggttgaggtgggaggatcacttgaactcaggagttcaagaccagcctgggaaaagtagtgagaccctatctctacttaaaaaaaaaaagaggctgggcgtggtggctcatgcctgtaatcccagcactttggaaggccgaggcaggcggatcacaaggtcaggagatcaagaccatcctggctaacacggtgaaaccccgtctctactaaaaaaaatacaaaaaattagctgggtgtggtggcaggtgcctgtagtcccagttacttgtgaggctgaggcaggagaat[141 bp omitted]gaagaaagagaaagaaaagaaagaaagaaagagaaagaaaagaaagaaagaaagaaagaaagaaagaaagaaagaaagaaagaaagaaagaaagaaagagagagaaagaaagaggcgggccaggccaggcgcggtggctcacgcttgtaatcccagccctttgggaggctgaggcgggcggatcacctgaggtcatgagttcgagaccaccctggtcaacatggtgaaaccctgtctctactaaaaatacaaaaaattagccgggcatggtcgtgggcgcctgtaatcccagctactcgggaggctgaggcaggagaattgcttgaacccgggaggcggaggttgcagtgagctgagaccacaccattgcactccagcctgggcaacaagagcaaaactctgtctcaagaaacaaaaacaaaaacaaacaaaaaaccacacattaaaaaaaaaaaaaaaagaaagaggagggcatggtggctcatgcctgtaatcccaacactttgggaggctgaggcaggtggatcactgaggctgaggtcaggagttctagaccagtctggccaacatggtgaaaccccatctctactaaaaatacaaaaattagctggacatggtggtgaacacctgcaatcccagctactcaggaggctgaggcaggagaattgcttgaacccgggaggcggaggttgcagtgagccgagaccataccattgcactccagcctgggcaacaagagcaagactctgtctcaaaaaacaaaaacaaaaacaaacaaaaaaaccacacattaaaaaaaaaaaaaaagaaagagggcatggtggctcatgcctgtaatcccaacactttgggaggctgaggcaggtggatcactgaggctgaggtcaggagttctagaccagtctggccaacatggtgaaaccccatctctactaaaaatacaaaaattagctggacatggtggtgaacacctgcaatcccagctactcaggaggctgaggcaggaggattgcttgaaccaggaggcggaggttgcagtgagcgaagatcatgccactgcactccagcctgggtgacagagcaagactctgtctcaaaaaacaaaacaaaaacaaaaacaaacaaaatattagccaagcatggtggtgcatgtctataatcccagctacttgggaggctgaggcaggagaatcacttgaacccaggaagtggaggt[133 bp omitted]gaaagaaaaggggactctagggcctcaacaccaagctgaaagagagtctggaaccttatcctggggggcactgggcagccaaggggagggtgctgagcagggaaggggtatattcgtgtttttgagaccttggaggtaaaagaagagagattccagctgggggctggggctggtctgcagaaaggggactttctctgccttccgctgccaaggtccagcccaggccccagcatgtcccctttccctcctcctgggcaggtacttcatgaacatcacgtgggataaccgggattactccttcaatgaggacggcttcctagtgaacccctccctggtggtcatctccctcaccagagacaggacgtgggaggtggtgagtcgtagccccagacctcaggcatggcagagggtgtggactcctgcatcctggcagagggggggcttgaggtcgtggactaagagggaggaggggacaaggagcctggactcctgggtcctgggatctgaaggtgggaggggctcctgggtcttggaagaagctgctgcccacacacctaggtctgagggaagaggatcatggaggccaggatacaccgggaagtcttcccaggaagcctgactctctttccctttggccaaggtgggcagctgggagcagcagacgctccgcctcaagtacccgctgtggtcccgctatggtcgcttcctgcagccagtggacgacacgcagcacctcacggtggccacgctggaggaaaggccgtttgtcatcgtggagcctgcagaccctatcagcggcacctgcatccgagactccgtcccctgccggagccagctcaaccgaacccacaggtgacagctcgggatccaggagttccggctccaaaacccgcctcccgtgaagcccagtagtctgggcccccagccccctcctcccttgggacccaggacccacaaagccctccagcttggtgaccttaggcaaacctcagaattctttgagcctgagtttcccctgaaagcgctaaccatagttttagctgccgcctatcccttcctccatatcctctcttcatgagagagtctaaggagggggtccccaaactccccaagcctggtcactgcccgcagccctccaccggatgccccccgcccggaaaagcgctgctgcaagggtttctgcatcgacattctgaagcggctggcgcataccatcggcttcagctacgacctctacctggtcaccaatggcaagcacggaaagaagatcgatggcgtctggaacggcatgatcggggaggtgagggggcggacgg[134 bp omitted]caaaacggtgaaaccccgtctctactaaaatgcaaaaaattagccgtgcgtggtggcgggcgcctgtaatcccagctactcgggaggctgaggcaggagaattgcttgaacccgggaggcggaggttgcagtaagcggagatcgcgccactgcactccagcctgggcacagagtgagactcagtctcaaaaaataataataaaaaaaaagaggtcggcaccctggggcaggggcgcggccaaattgaggaaacacctgattggggcctggggcggggtcgcgggagggacatgccttggaacagggggcggggtcaggaggtgtcaggggcggggtttggaggagggactttggagcagaggaggcggggctaggagggtgggactcctaggggaagggggcagggctgggaggagggactttggggcagtggaggcggggctaggagggtgggactcctaggggaagggggcggggctgggaggagggactttggtacagaggaggaggggccaggagggtgagaatctaggggaagagggtggggctgggaagatctggaccaaggccttgaggtcttgctgggagcagccgggtaggacgcgggctaccaattcccaatcttgttccccatttctcacctccgcccttccctgccccactcttcgtccccctcctcacccacctcgcaatccctcttggccccttccctcaccctgtcactggtctgctcccggggcccgtctctgctcgccgtccgtgtcagtctgtccgcttgagccgggttcccccgcccactcctcatcgcccccaccccaggtgttctaccagcgcgcagacatggccatcggctccctcaccatcaacgaggagcgctccgagatcgtggacttctccgtccccttcgtggagaccggcatcagcgtcatggtggcgcgcagcaatggcacggtgtccccctcggccttcctcggtaatctggggccctgggacagggagctagccctaggcaaagtagccgtccccaaccgtgtgggccctgggatcagaaaacctgggttcccggtatcatcggtacttgaacccgctgtgcaacttcggtgaagtgacatcatttctgaacctcagtttcctaatctacaagatggaagaaataatttccctacccagaagacatttcatcaagaggctaaagaagcttgagctcaggagccttctcttgcactgcagcttccaagccctgcacctggttttgtattcataaggttgaattattttttctcaaagagagccctccaaattgtgcaagcttcaggccccacaaaacccaagtgttttcctgtactaggtatgagatgaagagaacaaattagcatggtaccaataccttgtaagcacttaagtcaccatcagtgtttactgagcatctactatgtgccaggtggtgggctccacactgggaacacagtggcaaatgaggaagacacaaatccctgtccagtaggatctctcagccttgtgaaggaggcagaagataagcttctacttctctctctctctctctttttttttttttcagacagagtctcactctgtcgcccaggctggaatgcagtggcaccatctcggctcactgcaacctcaacctgcctctcaggtttaagcgattctcctgcctc[134 bp omitted]cagcctcccaaaatgctggaattacaggcgtgagccactgcacccggacaagggttttaactacagaagatggtgtggggatatataatcagatttaagtttttaaaatatccagctctgtgtaatcccagctactccggaggctgaggtgtaaggatggcttgaacccaggaggcagaggttgcagtgagccaagatggcaccaccgcactccagcctggatgacagagccagaccctatctctaaaaaagaacaaagaaaaaaatcccactctgtggaagcaagtggctggtggggatgctactgcaaggtttatgccagagacagagtgggggtgtgcaataggaaggtgacagcagacagatgcagggtgtggttagagagctgcccaccagatgggctggtggctttgagatggattgggtagagggaccattgctgagctggagaagcgtacatcggccaagggcaacagtgcttgtcagttcccacttgctctctgaagtgtgagcaaagctcctgggagaggggaggggctggaagaagagccatcccttcctttgtgttttgttttctgtttatttcgcccagtggtgtctcctgtggcctcccctttgcaccaaggtctctgcagggcacactgagaagcaccacgtggggcccctgcttgcaggcagcacactgcagaggagtgacaaggtcctatttatgccccaccaagttgcccagcagaggtgacaggcgtgtccccagctgccgcagtgacagtccagggtgctgaccttgctgtgacgggggcagtcctgacagctcacacttggccctggaaagttgaatcacctggtcctaatctcaatgaaatggtgatttgggtttattgttggtgagctcccaggggctaaacacagttatcgaatgtgaggaggggacacatgaatgggaggttgtctaatggacagggcagggtgttaactctagcagggacacctaggagacaaggaagagagggtgtcgctgattcaggcacctgcgagttcttttttttttttttttttgagacagagtcttgctctgtcacccaggctggagtgcagtggcacgatctcagctcactgcaacctccacctcctgggttcaagcaattctcctgcctcagcctactgagtagttgggactacaggcgcccaccacgacacccagctaattttgtatttttagtagagatggggtttcaccatgttggccaggctggtcttgaactcctgaccttaggtgatcctcccacctcggcctcccaaagtactgggattacaggcgtgaaccaccacacccagccacctgtgagttttgagtaaagcatgggtgcttgagagagtgatcaggacagaaaggagagtgtgacaaggctgagtggcagggactttgtcctgggggtgctagggagcctggggagggctgtaagcaggggaggggccaggtcctctctgtgctgtgtgggggataggctgtaggggacagacaggagctcaggaggctggggaaatggttggtgggaggagatgaggcctgagccctgttggccatgagaatggagaggagaggcccaagtagcatcaggggcaggagcgtggggctggatactgacaggctgtggccagcgagggagaaggagggaggaagggaggacggcaaatgaggtttgggcctgtgactgggtggatggtggggctcccatcatgaggagcgtgggagctggtctgggctcagcatgggacatgatgaatggcctgaggagatggctggggtaggtggaggcttgggcctgtgactcaggaaacatttaggagacagtttctatttggtggctgaaaccacagaaatgcctgcgacggctctctttgagaatggctgcctcctaggggtatgggtgtgccataagactatcttggagatggagaagcagagatagggccagaataggatggggtcagatctgggctgcaccttgttccctgctggtagtaccctagggttttttttctttcttttttcttccttttttttttttgtagagacagggagttcaaggccagtctggtcttgaactccaggcgtcaagtgatcctcctgcctcagcctcccaaagttctgggagtacaggcgtgaggcaccgccccagcctgatccccgagtcttttgcttggctgagccataaccacgcactcccttgtccccagagccctacagccccgccgtgtgggtgatgatgttcgtcatgtgcctcactgtggtcgccgtcactgttttcatcttcgagtacctcagtcctgttggttacaaccgcagcctggccacgggcaagcgtgagtcccccttcctccatcccccgcctcggagatcccgaaccacagagacagagaactacatttcccagcagcccctggagggggggcggtcaagctagggcctctcgggaggtgccagatgccttgagggccactgggaattgtagttctttctttttttttttttcccttccttattgagaagggatttggggtccatgtccacgtcctggccccctgcaggccctggcggttcaaccttcaccattgggaaatccatctggctgctctgggccctggtgttcaataattcggtgcccgtggagaacccccggggaaccaccagcaaaatcatggtgctggtgtgggccttcttcgccgtcatcttcctcgccagctacacagccaacctggccgccttcatgatccaggaggagtacgtggatactgtgtctgggctcagtgaccgcaaggtgtgtgtgggcccagggctgggctggagctggggctggggctggaggtcacagagcttgtcatgtggtagattagaggggattcttgcggggggcgggggtgagaggggtggggggagggcgggaaggggtctcttcccaaggagaattccagaatggtagaatggaatgttgtggatgaagaaagaacacggttcacgatgagctatttaaaatattcctagggaagagggtgtccctgaatgttctaggggcagttgtgtcaaataggatattctagaaccagtgcttctctcaaactgtgaggaaggattaatttttgaaacttctaaggctggg[138 bp omitted]gtgacaggcacctgtagtcccagctacccgggaggctgaggcaggagaatggcgtgaacccaggaggcagagcttgcagtgagccgagatcgccccactgcactccagccagcgcgacagagttagactctgtctcaaaaaaacaaaaaactgctagtccattgcagacaatgcttttgtaaaattcaacggaaatgaattattagaaaag[143 bp omitted]tgaaacctcgtctctaataaaaatacaaaaattagccaggcgtggtagtgggtgcctgtagtcccagctacttgggaggctgaggcaggagaatcgcttgaacccgggaggcggaggttacagtgagccatgattacgccacaaatagaactgattcctagcctgggtgacagagcgagactctgcctaaaaaaaagccaaactcacatttttatttattagattcaacagacgaaaaagaattctgtcaaatcactctaaatgctcactctctccattcctgtacacatctcactgcaatcaccgtttgttgagggactggtggtttgcagagcatactttgagactaaagtgattaactagctgggtgtcatgacctattagaggcttgagaaatcagtttgatgggttgcaataagcattttttaatggaatggagtagaatagaatagttgcctgcatcttatgtataagtttggttttacaaaacttgttttagttgtctgggcgcggtggcttatgcctgtaatcccagcactttgggaggccaaggcgggcggatcacctgaggttggtagttcgagaccagcctgaccaacatggagaaaccccatctctactaaaaatacaaaactggctgggcatggtggtatgtgcctgtaatcccagctactcgggaggctgaggcaggagaatcagttgaacctgggaggcggaggttgcagtgagctgacagtgtgccattgcactccagcctgggcaacaagagcaagactccgtttaaaaaaaaaaaagtgaactatttctgaacggattggtaaatagcaacagctcccagctcctgccatgccagcctctactcccaggacctcccgcgattcagtaagtgaagacttaacacctggcacatcaggggcctcagggaggcttctcgtgaacttttggatcacgtgtctgcaaccgtgtgtgctgggtgggagtggaaaagcattccctaatgtagtgagcgagtgttgagaaatattgaacactcctgggactggggtgtctgccagatagcgggtgtgtctcagaatgggtgatttatgttagggatgtccctgcggagggtgccctaatcactccccattctgccccagttccagaggccccaggagcagtacccgcccctgaagtttgggaccgtgcccaacggctccacggagaagaacatccgcagcaactatcccgacatgcacagctacatggtgcgctacaaccagccccgcgtagaggaagcgctcactcagctcaaggcagggtcagcgcagactcgggccgggggtgggggttgggccgctggggacctgaggatgctcaaagatggcaaggggtccaggttcattcattcagtcccagaggtcagccctgggtgggtcagcttggagggcggaggtcactgagggtggaagtggactcctcctcccaggagcaggctccttgggatattttctgggatgcagtatttctggattctggggtgagactgatggggctcaaatctttgctcttccccttcttggctttgtgaccttgggcaagttactcagcctctctgaacctctgtttcctcctctgtaaaatgaggataacaagagtatccccactgtaatgatcataaggttgttacaagaattatactagtaagccgggcacggtggctcatgcctgtaatcccagcactttcagaggccaaggcaggcggatcacaaggtcaggagatcgagaccatcctggccaacatggtgaaacctggtctctacaaaaaatacaaaaattagctgggcgtggtggcacgcgcctgtagtcccagatacttgggaggctgaggcaggagaatcgcttgaacctgggagtcggaggttgcagtgagccgagatcatgccactgcactccagcctggcgacagagcgagactccgtctcaaaaaaaaaaaaaagaattaaactagttagtccactcagaacatttatttatttatttagaacagtgcccggtgcactataggtgtttgctgatattatcattatcattagacctgaactcactggaatcaatgcttagattgtgtttcttatctttttacatccctttcccaaatcatagggatgaagttaaattcagaggccaggcgcagtagctcacgcctataatcccagcactttgtgaggcggagacgggcagatcacttcaggtcaggagttggagaccacctggccaacatagtgaaaccccatctctacttaaaatacaaaaattaggctgggtgcggcaacaggctcttgggaggccgagacgggcagatcatttgaggtcaggagtttgagaacagcctggccaacatgatgaaaccttgtctctacttaaaatacaaaaattagccgggcgtggtggcgggcgcctgtaatctcagctgcttgggaggctgaggcaggaggatcgcttgaatgcaggaggcggaggttgcagtgagccgagactgtgccattgcactccagcctgggcaacagagacagactccgtctcaaaaagaaaacaatacaaaaaaagttgagttcaggccccaaagtgcagcccacgaatacaacaaggctgagcacagtaactctctccccgtcctgcatttactcagtccttccgtgtgcatttttcttatcctctgctgtacgctaagcggtgaacaaatagacccgattcctaggtctagaggtgggaaatgaacaataaacatgcaaacagaaaaatcaagatctcttcagaaagtgatggtgagctagagggcggcagggctgggatattttcaccagggtgttcagggtgggcttctcggaggaggtgacatttgtgcagagccctgcaggaggtgaaagagctagccaggtggacttccggaagcagagccttcagacggagggaacagagtgtgcaaagggcctgaggaaggtgcagtgttggtttactggaggaacagcaagaaggccagtgtggttgaagggcaaggagctgaggtgagagagtagatgaggggaggattctgggcatgaggccaaggtcagggctggactttatgctaaaggcggtgagaagccttgaggtgtggagattttacgtaaggaagggtatgatctgatttctgtttttgtttgttttgagacaggatctcactctgttgcccaggctggagtgcagtagttcgatctcagctcactgcaacctccgccttccctgggttcaagcaattctcccacctcagcctcctgagtagctgggattacaggcgtgcactactatgcctggctaatttttgtatttttggtagagatgaggtttcaccatgttggtcaggctggtcttgaactcctgacatgaggtgatctgcctgcctcagcctcccaaagtgctgggattagaggcgtgagccaccatgcctggcttaaaaaaatttctaatgcccaatgcagtggctcacacctgtaatcctaaagctttgtgaggccaaggtgagaggatcacttaagaccaggagttcaa[143 bp omitted]ctcccgggttcacgccattctcctgcctcagcctcccgagtagctgggactacaggcgcccaccac[187 bp omitted]aatattattttgacacgtaatcagtataaacatgggtgagaccgtttacataatttttttccccacacgctgtctttgatatctgtggcattttacactcacagcacatctaggttcagagtgaccacatttcaagtgatccacagccctagtggcgtgtcactgctgcactggaccgcccaggtcgacatcacccaaatgcaaaaagtttcctagtcaacataatgaacagaaaatataaaagggcgctggccgccccccaggaccctgggactttttcacttccttactcacccagagcattctccccagccagcctgctgactcatctctcccccttcccccttcttccgttttcttctcgccagcccttccctccaggaaggaccctgagaattccagattctctcttctctctctctctctctctctcacacaaaacagggtgcctttccaggctgccacctcccacctctgcttcacttgcgccttcctcagaaggcagggatggctgcaaacagaatcactttcctcttttaccccttcagggatacctcacactgccagcctgctcagtccttgcagtgggagagcaagaattcagagactctcagtgggcgggcgggggggatcccattttctttttttgagatggagtctcgctctgttgcccaggctggagtgcagtgctgcaatctcggctcactgcaacctccgcttcccgggttcaagcgattctcctgcctcagcctcccgagtatttgggattacaggcatataccaccatccccggctaatttttctatttttagtagacatgtgatttcact[141 bp omitted]agcaagtggtgagaatgtgactagcaagacagaccagccccatctctcaaaatgaacctaaatctgtccccgccttgagttcagagaaagcaggatacctgtattttttttcccatacaaatgtcagccacatcaccagcctttaataagtaaaaatagctgaggcctcatcccgtgtctttttatagatatttttcatcttttttttattgagatatatacatagatacagtgaggtacagtgaggtacaaaaagcgtgcaactcattatttatacattcatagacatccatgtgaccaggtccagattaaggtatggtgaatttcccggcttctcataaagcttcccctgcccctccagtcaccatagaatatcatataattagttttgcctgattttgaacgtcctctaaacagaatcaaacagtgcatataataccttcctgtctggcttattttcctcagtgttatcaccagattgttccttcattgctgaataccgttgagtataccattatataaatataccataattctttcattctactgctggtggacattcaggttattgccagtgtttggccattatgaatattgctttttttcttttctcttctttctttttctttctttctttctttctttttttttttttttttctgaaacagagtctctctctattgcccaggctggagtgcagttgcgcgatctcggctcactgcaatctccgtctcctgggtttgagcggttctcctgcctcagcctcccaagttgctggaattacaggcgcctgccaccacgcccagctaatttttgtatgtttagtagagatggggtttcaccatcttggccagactggcctcaaactcctgacctcaggtgatccaaccgccttggcctccaaaagagctgggattacaggcataagccatcatgcctagctgaatattctcttttttaaacatgtgtaattgcctcttttttttttattttttatttttatttatttatttattttttcagacagagttttcctctgttgcccagactggagtccagtggtgcaatctctgctcactgcaacctccacctcccaggttcaggcgattctcctgcctcagtctcctgagcaggtgggattacaggcacacaccaccatgcccggctaatttttgtatttttagtaaagacggggtctcaccatgtt[135 bp omitted]tttgggggacatacacattccttttccttggttgtattcccataggtggaactacccggtcatagggagagtatgcttagctataacagatactgtcagacatcttccaaaacagttaggcacagtggctcatgcctgtaatcccagcactttgggaggctgaggcaggcaggtcacttgaagtcaggagttcgagaccagcctggccaacatggcgaaaccctgtctctacaaaaaaatacaaaaattagccaggtgtgctggcaggcacctgtaatcccagctactcaggaggctgaggtaggagaactgcatgagccctggaggcagaggttgcagtgagccaagaccacaccactgcactccagcctggctgacagagtgagactccctctcaaaacaacaaaacaaaacaaaacaacaacaacaaaaatccaaagtggttgtaccaatttacactctcatcagcaatgcaagagagttctacttgttccatat[138 bp omitted]cctccgcctcctgggttcaagcaattctctgcctcagcctcctgagtagctgggattacaggcatctgccactatgcccgggtaatttttgtatttttagtagagatggggtttcacca[141 bp omitted]tatcaagtcctgttctaactaatttaagttcacaattagtttgcaaaaaattaatcaaatcaatgttttgattcatagtcctggaggctaggcatcctcttggctccttcagagggctgtgagggaaggatctgtccaggcctgcctctccttggctgttgactcttgatccctgtatctcttcccatcatcttccctctgtttgtgtctctgtggccaagttcttttttttttttttttttgagatggagtgttgcccaggctggagtgcagtgacatgatctcggctcactgcaacctctgccctctgggttcaagtgattctcctgcctcagcctccttagtagctggtattataggcatccgccaccacgcctggctaatttttgtatttttagcagagatgggtttttgccatgttggccaggctggtctcgaactcctgacctcaggtgatatacccacctcagcttcccaaagtgctgggattacaggtgtgaaccaccgaacccagtcaagctcccccctccccctccccgctttttttttttttaattgagacggactttcactcttgttgccccggctggagtgcagtggcacaatctcggctcactgcaacctccacctcccgggttccagtgattctcttgcctcagcctccctcctgtagctgagattacaggcgtgtgccaccaagccccgctaatttttgtatttttagtagagacggagtttcaccatattgctcaggctggtctcaaactcccatcctcaggtgatccgcctgccacggcctcccaaagtgcttggattacaggcgtgagccactgcgcccggcccaagttcccctttttataaggacactagtcatactggattagagcccaccttaatgatctcattttaactggattccctctgcagaggccctatatacaaataaggtcgcattctgaagtactaggggctaggacttcaatatgtgaatttggtgagggaacacaactaaacccttaagacctcataaaaaatcttaggtgggtatgattggaaacatgaggagcagcaagcttcttgcatctgctaagtggcagaactaggactggaaccctggcagcccagttctacagcccaggttctcaccactaggctatattgcctcacatgtgcactgagtaacccagaatcactccttttgtccccctccctagaagcttcatgattcacaaaggacacccctgtgtttctcattgtcatctcttgctctaatttcctgcttctgctgaattctttttctccagtatcccttgttactttttcttttttttctaatttttagttctatatttatcagagttctccatccacatagtttggagagtcagatacaagaatttcagtttagtttagtttggtttgggagtcaaggtcgcactctgtcacccaggctggagtgcagtggcatagtcacagctcattgcagcctcaagctcctgggctcaagtgatcctcccgccttagcctcccaagcagctgggactacaggtgtgcacccccacatctgattaattttattttatttatttatttttttgagatggagtcttgctttgtcacccaggctggagtgcagtggcgtgatcttggctcactgcaacctctgcctcctgggttcaagtgattctcctgcctcagcctcctgagtagctgggattacagaagcctgccaccacgcccagctaacttttgtattttcaatagagacagggtttc[132 bp omitted]gtgtgtgtgtgtagagatggggttctcactatgttgcttaggctggtcttgaattcccaggctcaagtgatcctcctgcctcagcctcccaaagcaccaggattacgggcacgagccaccgtgcctggaaagaattttatctttaaggaaaaaaatggcaccctccatttctctcagcccagaggaatctactttcaccttgtttattgtatcactttgtgatttatctccctatctctaaataccatgtttgcatgactacctcttgatttttcaattttaggcatttttccatccgcttctcactatggaagacatactcatactcttatttaaatcaattcagcctcccacattgtgactctgacagatgaatattcagtgtttacatgttatgactatgtaaatgctctcacagctgccacagtagtaaaccgtgattactttcctctcctacacaattctttgtttttctttcttttttttcttgagacagggtctcactatgttgcccaggctggagtgcagtggcgtgatcttggctcactgcaatctgtgcctcccaggttcaagtgattctcctgcctcagcctcccgattagctggactacaggcgtgcgccactgcgcctggctaattttggtaattttagtagaggtggggtttcaccatgttggccaggctggtctcaaactcctgacctcaagtgattggcctgcctcagcctcccaaagtgctacgattacaggcgggagccatagctcccagctgatagggggtttcaccatgttggccaggctggtctcaaactcctgagctcaagggatctgcccacctcagcctcccaaagtgttgggattacaggtgtgagccaccatgcctggtctatttttcttgaggttagtaactgtcttttttctttttctttcctttttcagttgcttcatggctgtgttttctttgtggttaactaattcaaacccaaattatctgtttactgtctaaatctcttcttggtatgttcagaagtatattaatatacttaatatgttagaagtatcagatactctgttaatttcttttttcttttttcttttttttttttttttgagacagggtctctctctgtcactcaggctggagcacagtggcacgatcttggctcactgcagcctctgcctcctgggttcaagcgattctcatgcctcagcctcccaaatagctgggattacagtcgtgcaccaccacgcccagctaatttttgtattttttgtaaagtggggtttcgccatattgaagagcttggtctcaaattcctggcctcaagtaatctgttcacctcggcctcccaagtgctgggattacaggtgtgagccactgtgcctggccttgtcaatttcatcttattgaagaagttgctcttatggccttctggcctgctccagcctgggcatagccgccatcttgggatcacctttcaccttcatcccttcatctctggtttggatcctgttgtagcacaaattctaactctttctgggttttgcttccttgttcttttgagcttcctgacagaggcacatagcgggtatatttttggagacattgcaaatctgaaaagtctttttttctgtccttgtacttgatggacagtcaggctgggtatagaattctgcattagagctcattttccttcagaatttggaagagtcactctattgttttctaatatccagtgctactgtagagaaatccaagatcattctgattcctatgcctttgtatgtaacctgttgtttcttttccttgtccttggtggactgacatttatcagtgacatgccttgatctgtttcccttttttttttttttttgagacggagtttcactcttgttgcccaggctggagtgcaatggcacgatctcagctcactgcaacctccacctcccaggtacaagcaattctcctgtctcagcctcccaagcagctccgattacaggcatgtggcaccatgcccagctaatttctttgtatttagtagagatggggtttcaccatgttagtcaggctggttgcaaacttctgacctcaggtgatccacccgccccagcctcccaaagtgctgggattataggtgtgtgccaccgcgcccggcctgctttcctttcttttcttttatcttttctttattttttatttttttgagacagagtcttgctctgtcaccaggctgaagtgcagtggcgtgatcttggcttactgcaacctctgcctcccgggttcaagccattctcctgcct[226 bp omitted]atgttttccaggctggtcttgaactcctgggctcaagcgatcctcctgccttggcttcccaaaatgctgggattacaggcatgagccatgcgcatggccattgatctgtttccgttgctgggtctttcaatcgtattctcatgtcatttgttctgagaaaatttcttgaattttcttaaattcttttatgtacaatatctccctctccttcatttctctgtttgtttatttatttatgtttagagacagggtctcactctgttccccaggctagagtgcagtgaggcaatcatagctcactgcagccttgacatcctgggctcaagcaatcctctcgcctcagcctcccgagtagcttggactacaggtgtgtgccactttcgtgtagagacgggggtctcactatgttgcccaggctgctcttgaactcctaggatcaagcgatcctaccaccttggcctccaaaagtgttaggattacaggtgtgaggcaccatgcctggccagaaactggactttctttttttttttttttatttcattttgcttttttttgagacagagtcttgctctgtcacccaggctggagtgcagtggcacgatctctgctcactgcaacctccacctcccgggttcaagtgattctcctgcctcagcctcccgagtagctggttctacaggcgcccgcaaccatgcccagctaatttttgtattttcagtagaggtggggtttcaccatg[131 bp omitted]tgggaggacgagaagggcggattgcctgaggtcaggagttcaagaccagcctgaccaacatggtgaaaccccatctctactaaaaatacaaaaattagccgggcatgatggtgggcgcctgtaatcccagctactcgggaggctgaggcagaatcgcttgaacccgggaggtggaggttgcagtgagctgagaccagcacattgcactccagcctgggcaacaatagcataactctatctcaaaaataaaaatagaaaataaagaataaataaataaaatttaaatgcaaatagccatatgtggcgagctagtggttgccatagaggacagcactagaaaattccatctttacagtgaggcacaagggagaggcagctcccagggctctggccggctcgcaggccaaacgtgggctcaccctaccgcttccggcaagtaaccccacagggggagaaaggaaatgcacgtcctaaaaagaaatagagaaacacagcttctcctcccagccagttcttggtgccctttccatgagagatgtgcaatttctcactcactcaagaggggcaaaaaaggaaatatcaaggcccctttccgtaatgtaagcattatttttttttcttttggatcaattaaaatatggatgcattcacactcacacattccaaactaacagtacacactgttctcatcttgcctttttccacggagaaagcccttttggcatcttttctgtgttaatggaatcctacttctcagctccagtgtctgggccatggaaggcctcccttggaccagtctgagtttactcatttggccgcttcttttctttttttttttttttgagatggagtctcgctctgttgcccaggctggagtgcagtggcgcgatctcggctcactgcaggctctgcctcccgggttcataccattctcctgcctcagcttcccgagtagctgggactacaggcgcccgccacctcatccagctaattttttgtatttttttagtagagacggggtttcaccgtgttagccaggatggtttagatctcctgacctcgtgatccgcctgcctccgcctcccaaagtgctggcattacaggcacaagccaccgcgcctggcggccgcttcttctattttcttttgagatgcagtctcgctctgtcacccaggctggagtgcagtggtgtgatctcagctcactgcaacctccacctcctgggatcaagtgattctcctgcctcagcctcccgagtagctggaactacaggcacacgcaaccacacccagctagttctttttatttttagtagagatggggtttcaccatattggccaggctggtcttgaacttctgacctgagatgatccgcccacctcagcctcccaaagtgttcttgggattacaggcgtgagccaccatgcctggcccacttcttttcttttctttcgaacttcttttttaaaaatttttaattgtatttttttttttacagatggtctcactatgttgcccaggctggtctcaaactcctggcctcaagcaatcctcccaccttggcctcccaaagcgatgggatgacaagcttgagtgaccactccctacctgaacttttgttaaatttattcctaaatattttattttattttattttttatttttttgccagtgtcaaactcctgaccccaaggaatctgctggcctcagcctcccaaagtgctgggattataggcatgagccaccgcacccagcctggaattgttttaatttcattttaattgttcattgctagtatataggaatataatttatttcacatattttgtaatttatttcgtatattgatcttgtatcatgaaccttgttgaacttctattagccataataatttttattgtggatcctttgggatttttctatatacaattctattaattcgctagggcagccataacaaaataccatagactgagtggcttacacaacagaaatgtatcgccccacagttgtagaggctagaaggtcaaaatcaaggtgtcggcagtgatggctccttttgagggctgtgggaggacctcttccagaccttcctccttggcttgtaaaaagctgccgtcttcctctgtctcttcaccttgtctaccctttaagtgcccattcagccacttgtttttttttttttttttttgagacggagtcttgctcttgctccattgcccgggcaccatctcagctcactgcaacgtccgcctcccaggtttaaacaattctcctgcctcagcctcccaagtagctgagattacaggcgtgtgccaccacacctgactaatttttgtatttttagtagcaacagggtttcgccatgttggccaggctggtcatgaacttctgaactcaggtgatccgctcgaggttcaagcaattctcctgcctcagcctcccgagtggctgagattacaggcacatgccaccacacccggctaatttttgtatttttagtagagatggggtttcactatgttggccaagctggttatgaactcccgacctcaggagatccgtgccccgggcggcctcccaaagtgctggggttagaagcatgagccaccacacccagccgtccagccatttcttagtaagcacctagtgtgtgctaggcactgttctagaccctgtggatacagtggtgaatcagacgggcaaagtccctgcctcatggaacttaaattccagtgaagggagacgtgcaatgcacggaataaatgagaatattctatagtgcattccaaggggatacgcgctatgggtaaaaatagggcagggtgaatgcatttggaaaactggggcgggagactggaggttgcagtatcaaatagggtgctcaggaaggtgtctttggagcaaacacctgacggaggttgtaactgcccagtgggttcacgttgcccgctgcctagacagagccgatttatcaagacggggggtctgcaatggaaaaagagtcattcacgcagagccggctgtgtgggagaccggagttttattatcactcacatcagtctgcctgagcatttgggaaccagagtttttaaagataatttggcgggtaggggcttgggaagcggggagtgctgattggtcaggttggagttggactcacaggcggtcgaagtgaggttttcttgctgttttctgttcctgggtgggatggcagaactggctgagccagattaccagtctgggtggcgtcagctgatccatagagtgtagggtctgtagaatatctcaagcactcatcttaggttttacagtaatgatgtcatccccaggagcaatcgggggagccagaggctgcatggcccctaaccttaatttctaatcttgcagctaatttgttagtcctgcaaaggtagactagtccccaggcaagaagggggtctttttaggaaagggctagtatcgattttgtttcagagtcaaaccatgaacagaattccttcccaaagttggtttggcctatgcccaggaataagcaaggacaacttaagggttagaagcaagatggagtcagtcaggcaaaggcactttcaaggtgagagagtgagtcaggcagctgtctaggagaagaatgttccagcaggcagaacagccagtgcaaaggccctggggcaggagcgagctggagaggtccaggtgcatctcccaggccagagtgagggggggcttgggagatgagggcagatgggtaaggagggatggggtgtcaggtggcacagggcctctaaactcgaggtgatccaagtcactctgagtgacgaggggagccaagagggggtggtgagctgaaaagggacagcgctgactcaaatgttaagatccctctggtgacagagtgggaacaaacaagaaagaaaggacggatgcagggaattttaatttttccccaacctacacccaaacaaaggctgtaggaaatggctgaggtctttttgttttgttttgttttgttttcgagacagggtctccctctgtaacccaggctggagtacatggcacaatcatagctcactgcaacctcatcctcctaccctcaagcgatcctcccacctcagcctcccaagtagctgagatgacaggcatgcaccaccaaacccggctaatttttaaagtttttgtagagacaggtctccctttgttgcccaagctggtctcgaactcctggacccaagcagtcctcctgcctcagcctcccaaagtgctgggatgacaggcatgagccagggcccctggaatggctgagttttaatagatatttagggaccatgaaggggtggtggatgcgagaggggagggagacagtatatcccagaaaaactgagcaaaccattgaaagtgaatgctgttagagctcctctttctgaaatctctcaaatatttccaccactggaagccttgacttttagctttctccaaaatgtaacttgagtctctccttccactcccgcttgtcctctgaggacccctggagacactcctcccatcttatcccagtcccagcccttctatccctaactctagaaactccacattcttcccacttaaacatcaatagcacttcacctttcacccccaagggcatcttcctaaacaaagagaaacgtagggaaaaattacagtttgcctacaaggcagaagtgcctgcaggcagtggtggtatttttctcgcctatacttatattccagatgtcatatgggaactccctgttaggatctatataaaattaattcaaaccccattctccaacggtgggatgatgaatgtcctccccacgtttctgctaattctccggagcttcacattctccacccctgagtctttgcttcagctagagacattcaatttgggggatccacttcctgtctgtttccccacttagcatgtatggactaattcagtccttttctctaatttccacgcaaacaaccacacacacacggcatttatatgtgagcctgtgagtgcgtggacagggtttttctgaaggtttggggacataggaggacttaaatcaacagacaggctaactactcaagactagaggttaagtattcttctctggaagatcctttggcttctcttcaactcagcatccagccgcctttttttttttttttttttttttttttttgagacggagtcttgctctgtcgcccaggctggagtgtagtggtgcgatctcggctcactgcaacctctgcctcccgagttcaaacgattctcttgcctcagcctcctgagtaactgggactacagatgcctgccac[175 bp omitted]ttcgccatgttggccaggctggtatcgaactcctgacctcatgtgatccgcccgcctcagcctcccaaagcgctgggattacaggcgtgagtcactgcgcccggccaatatgaactcatattctatataggattctgggagtaatttttgtgttcatttgttttgtttttagagacagggtatccctctgtcacccaggctggggtgcaatggtgtcatcatagctcactgcagcttcaaactcctgggctgaagggatcctcctgcctcagcctcctgagtagctgggaatataggtgcatcaccacacctggctaatttttttttttttttatagaggcagggtatcactatgtggcccaggctggtctcaaactcctgggctcaggcgatcctcctgccttggcctcccaaagtgttgggattacaggcatgagccatcatgcccagcctaactttttaaaaaatacaccccataaggtcaggtgtgaaagctcatgcctgtaatcccagcattttgggaggctgaggcaggaggattgcttcagcccaggagtttgagaccagcctgggaaacagagtgagaccccatctctaaaaacaaacaaacaaacaaataaataaataaatatttaaaaaatatataaaatacaccccatacatccttacctgtcagagcataagcatttatctcataccacagaagagttacacagtattcctctgtgtggattcatttattcattcattcatttattctgcaaatatctatcaaccccgtcctacatgccaggaactatgccccagccacagatgagaataagaccaactgggaccctgggggtcttgcagtctcatggggaaggttgagattaatcaaacaaccacagaaataaatgtaaaatgacagcagttgtaaatgagagtgatagcagcatgtgccataacaaatgcatccatgagaactaactccacagccctgcccttcttcccaccaagtcttagaaatcagggcctaggctgggcacggtggctcatgcctataatcccagcaccttgggagaaacccactttgggaagccaaggtgggacgataacctgaggttgggagtttgagaccagcctgaccaacatggagaaaccccatctccactaaaagtacagaattagccaggcgtggtggcacatgcctgtaatcccagctactccggaggctgagacaggagaatcgtttgatccggggaggcggaggttgtggtgagcccagatcgcaccattgcactccagcctgggcagggcctaggccaagtgtggtggctcacgcctgtaatcccagcattttgggaggctgagttgggtggatcaactgaggtcaggagttcaagaccagcctggccaacatggtgaaaccccatctctactaaaaatacaaaattagccgtgtgtggtggtgcatgcctataatcccagctacttgggtggctgaggcaggagaatcccttgaacctgggaggtggaggttgcagtgagctgagatcacgcctctgcactccagcctgggggacaagagtgaaactcggtctcaagaaaaaaaaaataaataaataaataaatcagggcctagtgggagaacccaagcaagttatgtgtctgggtctgtgttttcccatctgaaaagaatggttatctccctacaggctcacacctgtagtcccagtactttgggtggccaaggcgggaagatcacttgagcccaggagttagagcccagcctgggcaacatggaaaaaccctgtctctacaaaaaatacaaaaattagccagatgtggtgatgtgtgcctttagtcccagctactgaggaggctgaggcaggaggttcggttgaaccgaagaggtcaaggctgcagtgagctatgatggtgccactgcattccagcttgggcaacatagtgagacctcgtctcaggaaaacaaaaaaaaagtgtccttagactagatagaacaatgcttggcacaatataactgatcattcacttgcattatttttttccctcaatcttcctctttatttgttttgagatggcatctctctctgtcacccaggctggagtgcagtggctcgattttggctcacagcaacctctgcctcccaggttcaagcaattctcctgcctcaacctcctgagtagctgggattacaggtgcctgccaccacacctggctaatttttgtattttcagtagagatggggtttcaccatgttggccagactggtctggaactcctgagctgacaggtgatccacctgccttggcttcccaaagtgctgggattacagccatgagctaccatggccagtctcaatcctcttttttaaaatgcaagagtaaatggactctttggagggctatggtgaggagtaaaggaataactatttcattaacagtcacagctggccaggtgcggttgctcacgcctgtaatctcagcactttgggaggctgagacaggtggaccacaaggacaggggttcgagatcagcctggccaacatggtggaaccccgtctctactaaaaatgcaaaaattagctgggcgtggtagtgggcacctataatcccagctacttgggaggctgaggcaggagaatcgcttgaacccaggagtcggatc[136 bp omitted]tactatctaagctttccctatagtccctgctactggggaggctgagataggaggatcgcttgagcccaggatttctggtccagcctggacaacatagcaagaccctgtctcttaaacaacatacttttgcaacaactctgaagggagatactgctgccatgcccattttactgatgttgaaactgaggcactgagaagtgcaatgatttgctcaagagctcagggccagttaggatttggagcagttggaggttacaggtgaggaggttccaggcctggcggccagggcatctaggtgggactgaccctaccctccattccccctccccccaggaagctggacgccttcatctacgatgctgcagtgctcaattacatggcccgcaaggacgagggctgcaagcttgtcaccatcggctccggcaaggtcttcgccacgacaggctatggcatcgccctgcacaagggctcccgctggaagcggcccatcgacctggcgttgctgcagttcctgggggatggtgcggctgcacacagggatttccacagcggagagggggagggcgaggcccctgggttccggggaagaaagggacaaagacccggacaccagggtctgagggaggaaggggctaagggcctacattcccacatcacagacaagggtcctcagagggtactcatagcaggtgacttttgaccgcccctccctagatgagatcgagatgctggagcggctgtggctctctgggatctgccacaatgacaaaatcgaggtgatgagcagcaagctggacatcgacaacatggcgggcgtcttctacatgctcctggtggccatgggcctgtccctgctggtcttcgcctgggagcacctggtgtactggcgcctgcggcactgcctggggcccacccaccgcatggacttcctgctggccttctccagggtatggggcagagagggaggcagagagggggagatggcaggggcggggacaaaggtaaagccgagcagagacaaggagatgtgggtcgagatgtggatagtggggaagagagcgggaaacacaggcgggtaaatggagaggagagagggactgaggggaggcgggcaggcgtcctgggcatctcgcgctgacccccgtcctgtccccggacccgcagggcatgtacagctgctgcagcgctgaggccgccccaccgcccgccaagcccccgccgccgccacagcccctgcccagccccgcgtaccccgcgccgcggccggctcccgggcccgcacctttcgtgccccgcgagcgcgcctcagtggaccgctggcgccggaccaagggcgcggggccgccggggggcgcgggcctggccgacggcttccaccgctactacggccccatcgagccgcagggcctaggcctcggcctgggcgaagcgcgcgcggcaccgcggggcgcagccgggcgcccgctgtccccgccggccgctcagcccccgcagaagccgccgccctcctatttcgccatcgtacgcgacaaggagccagccgagccccccgccggcgccttccccggcttcccgtcgccgcccgcgccccccgccgccgcggccaccgccgtcgggccgccactctgccgcttggccttcgaggacgagagcccgccggcgcccgcgcggtggccgcgctcggaccccgagagccaacccctgctggggccaggcgcgggcggcgcggggggcacggggggcgcaggcggaggagccccggccgctccgcccccgtgccgcgccgcgccgcccccgtgcccttacctcgatctcgagccgtcgccgtcggactcggaggactcggagagcctgggcggcgcgtcgctgggcggcctggagccctggtggttcgccgacttcccttacccgtatgccgagcgcctcgggccgccgcccggccgctactggtcggtcgacaagctcgggggctggcgcgccgggagctgggactacctgcccccgcgcagcggtccggccgcctggcactgtcggcactgcgccagcctggagctgctgccgccgccgcgccatctcagctgctcgcacgatggcctggacggcggctggtgggcgccaccgcctccaccctgggccgccgggcccctgccccgacgccgggcccgctgcgggtgcccgcggtcgcacccgcaccgcccgcgggcctcgcaccgcacgcccgccgccgccgcgccccaccaccacaggcaccggcgcgccgctgggggctgggacctcccgccgcccgcgcccacctcgcgctcgctcgaggacctcagctcgtgccctcgcgccgcccctgcgcgcaggcttaccgggccctcccgccacgctcgcaggtgtccgcacgccgcgcactgggggccgccgctgcccacagcttcccaccggagacaccggggcggggacctgggcacccgcaggggctcggcgcacttctctagcctcgagtccgaggtatgacgcggccccgggggccccaccgcccccttggtcagcgcaggccacggcccgagggggcgcccgcagtggacaggacccgcgtgggttgggaaggaaagcagtggaactggccggaccccgcctggagcagcgtcctgcgccccctggttctggaggaaccgcaagccggagaggatttggtccctcaactatcacccagcctgagaacgagggggcgggggccttggagcccaccggacttttttttaaacccgacaagggctttttaacgtcaccagatggggcgggaggtggggggttcacgccactcccgcgtcccacctccacgcccggggccgtggcccccacatcactgtgcagctccccggccccagccgcgcctccggggaagcccgtttttaacctttcatccattgggactcaaaactgtgagacgcgttcgccaaactgtgaccccagaccttggccccgccacacagaaacccctgacccagactgtgacatccgactcctaaaatggtcatccgactccagactgtgacccctgaccccaaactgtgacccgaaccccagactgtgccccgaccagactgtgacccttgacatcaaaccgtgacaccccctcctcctcttccaccctcggtcgcttttccctactctgacctaggacacgtccccaacggaagccccgccttcccttgcaccgcgatgaacccaacctccctgaagccaaaacttcccaccctgccgcacctccggaccaccccacttgccaccaagcacatcctctccaaatccaacccttatttgcgacccttcagtgatgacccagcagacctccaaaaagcctcctctgcccagatctccagccgggtctggggctgggttgcggaggggagggtctgggagtccacacttctccaccaacttcccttcccactctcttattccacattgcagtgtttggaataaaccatgtttttatgcctcctcagtccaagcctaagctccgtatctgttagcccccctcaaattctctggaggaaacagaaacacaaaagtcccacaggggaagaggagacagaattagagagagaacagagactctgaaaggaggtgcctggggagacaaagaccaagaaagaggaggtgggaagagaccctgaaaagaaagtcgagagggtactggggcagataagagaccccaagagagtggtgagatagatcccggagacaaaacatattaagatcaaaggtatggttttatttcctatggctataggtaccaaggcttgctacattctcaatatcctgttcatgcaagctaggagagtgtctgacatatcccagccaatccgcattatcttgaatgctgttaatctcaccaatgagaatctatttctaacatttcattatgtcaattagccaaaccgctggtgctgatgggcgataaagagagacgaagcacttgtaatagctgcctccagagggtggactttctgattaagtgctcgctgaccagagctgaaatgtgaatgtctggttaggcaattgactgcccctagagggtagattgaaccgcctaacttacagataatatccatcctgtctacaagaaagcatttttgaaacaaatgaaagccatcacaacagagagaggaaaagaaaccggccttatgggtcctcggggagtagaaactcagtctccttgccagtgaaagagcaaatttgcatatatgaataattaattaactggaaagaacgctctcggaatcaaactggacaatggggaaaacaagcctcccgtagaactacaactcccagaaggccttgccactaccgcgaggaacagcgcccaaagtcacgcgaagatgcagtttctccgtatccgcaggcttctttcgctggcgccattacctgagttctcctccagcgtttccgcaccctctccgattagcggtcccaggagtttccaaggtaaccgcgcagtagggcggatctcattaggcggaaagcgaaacccggaagtgacgctcttaccgggtgtcagcagcgagagggttcgaagatggcggcgcgcaagggtcggcggcgcacgtgtgaaaccggggaacccatggaagccgagtccggcgacacaagttccgagggcccggcccaggtctacctgcccggccgggggccgccgctacgcgaaggggaggagctggtcatggacgaggaggcctatgtgctctaccaccgagcgcagactggtagggctgagtccggactccagggtcctgaggtggctgatcccgagcctttaacctgagaggtgctcgggaagagaaggctggggtctaagagaagtgatttcataccggaggcggttgatccatgagggaggtggggactgagctcttactgtcccgtcttaactcgtaaaccccgccttccatccccaggcgccccctgtctcagctttgacatagtccgggatcacctgggagacaaccggacagagcttcctcttacactttacttgtgtgctgggacccaggctgagagcgcccagagcaacaggtaagacccgaggcttttccaggaccaggaggctcagtttccagccccttcctcagcacccaggagttagggcttccagtttctgcctctcgcagatccaggagtctgggtttccagcctctctccttcctaagaatcctggaatctagtgcctaactcaccccacaatttctcccagactgatgatgcttcggatgcacaatctgcatgggacaaagcccccaccctcagagggcagtgatgaagaagaagaggaggaagatgaagaggatgaagaagagcggaaacctcagctggagctggccatggtgccccactatggtggcatcaaccgagttcgggtaagtatggtcccaggagcctgctctgcatactctgaaacacatctgacccatcccctgtgtccataactcccaacacctcctcatgttcttttttttttttttttttttgagacgtagtctcgctctgtcacccaggctggagtgcagtggcgcagcctcggctcactgcaacctctgcctcccaaagtgctgggattacaagcgtgagccaccgtgcctggcccattttttttttttttttttttgagatggagtctcgctctgttgtccaggctggagtgcagtggtgcgatcttggctcactgcaacctccccttcccaggttcaagggattctcctgcctcagcctcccaagtagctggggctataggcgcctgccaccaggcccttctaattttttgttttttggtttttttttgagatgaagtcttgctctgtcgcttagactggagggcaatggcatgatctcagctcactgcaacctctgcctcccaggttcaagcgattctcctgcctcagccaagtagctgagattacaggtgcgcgccaccacgcccggctaatttttgtattcttagtagggacggggtttcacaatgttgatcaggctggtggtgaactcctgacctcgtgatccgcctgcctcggcttcccaaagtgctgagattacaggcgtgagccaccgcatctggccaattttttgtatttttagtagagacaaggtttcgccttgttggctaggctggtctcaaactcctgacctcgagtgattgatccgcacgcctcgggcacccaaagtcatgggattacaagcgtgagccaccacacccggcctccttcagtttttagaaaagtacttgtcacatagttttatacaatttagctattatgatcagtgtcattacatgttaggtactgttttagattatgaggatatggtttatgttcttcacttttctctttggtaacatagtgagttatagaacttatctgatggggctggcatgaggtcaaatgaaataacatatagtgcctagaatagcacctggttgtaatatgaggtatgtattttctgttactattcaggaactgtttttggttgtggctgtttgttttgtttttgagtcatggtttcactcccattgcccaggctggagtgcagtggcgtgatcttggctcactgcaacctctgcctcccaggttcaagtgattctcctgcctcagcctcccgagtagctgggatcacaagtgcacaccaccatgcccagtaatttttgtatttttagtagaaatggagtctcattatgttggccaggctggtcttgaactcctgagctcaagtgatctgcccaccttcgcccccaaaatgctgggattataggcatgaggcactgtgtccagcctgtttatttgttttttgcttcaaagctaaaacatcttctgatcaggtagacttgtaagtacaatgatacggtatatgaagagcacttagagcagtacttggctgatagctggggctgtctgtttccatgaaattatttttactatgtttcagtactgttctagatgcagaggatttagcagcaagcaaaaggtctctggctccatcaacttacacactagtgggggaagggaacgagatgaaactaagtaaatgtgtaccatgtccaaaggtgttaactatcctggaaaaaatccaatgaagtaggggaagagggttagggtgctccaggagtggggtgctatttttaaacagtgtggttaggaaagtattctgtcataaaatgccatttgcatagatactcacaggtagtggggcagtgaaccctgtaaaagaatttgcaggcaaggaaaaacacaagttcaaaggccctggggtgagcttggcatgtttgaagagtttcaagtgaagcgggagtgtccagtctgtctggagcagaatgaacaaaagggagaatgacacaatttggggagcgggcacagagaagacattgttcagagccttgtcggccactgtaaggactccagcttttaattgggagacgttggagggtttcaggcagaggaaagacagggtctgacttctgttttaaagtggtccctctggctgctgtccttaaatatcaattgcagagaggtaagggtcggaggaaagaatcctgtggggagacttacggtattcaggggaaggatgacatcagtagtagtgtgacagcaatagacatcatgagaagggggttggaagtgagcttttttttttagatgagacagagtctcgcttttgtcgcccaggccggagcgcaatggtgcgatctcggctcactgcaacctctgactcctgggttcaagcgattctcctgcctcagcctcctaagtagctgggattacagccacccaccagcacgcccgactaatttttgcatttttagtagaggcggggttt[131 bp omitted]cataggtgctgggcatgaggaccaagaatgagttctgaattttggggcctgaggtggagagagagcagttgcaggtggcaattaggagcttggctttggttgtatcaagtttgaatggtcaggctggcacagtggctgatgcctgtaatcccagcactttggaaagctgatgcagaaggatcgcttgagaccaggagttccagaccagcctgggcaataaagtgagaccctgtctctacaaaaaaattttaaaagccagatgtgatggtgcttacccatagtcccaactacttgggaggctgaggtgagaggatcacttgagcccaggaggttgaggctgcagtgagccattatggcatcactgcactccgtcctgggcaacagagcgggaccctgtctcaaaaacaaaaaagtttgaacggtcaatgcagtaagagtctggagcccaggggagaggtcagggctaggggtattggaaacctcgtggctggactgggtctcctagtgaacaaacacagaggcaaggagatccgaggactgagtcttgtggccttctagcatttagagggttaccgagaccaggagcctgaacaccctcccaagggctggtgggaattgcagcctcaactcccaggcatcctggggctctatcctcccacctcagctcccccacccactcccaccccctgtggagagctgtcccagttaccatgctggtttttgcaggttgtgattttcttcccacagaggtttcaaggagctgtagtcccaggcctgggagatctgaggaagcgcacttctggttctctgggatatggggagcgtggggtcagtgccttgatcctcctctcccctcgcttcacatcacccttcccccaccgctcttctgcaggtgtcatggctgggtgaagagcctgtggctggggtgtggtcagagaagggccaggtggaggtgtttgcgctgcggcggcttctgcaggtggtggaggagccccaggccctggcagccttcctccgggatgagcaggcccaaatgaagcccatcttctccttcgctggacacatgggcgagggctttgcccttgactggtccccccgggtgaccggtgagtccctggggtgttcaggagtcccgggaggtcgggggagcagggtctgcaacaaggggccgggcgcttagactccaaggaggggagcgagctgcggccaggtggggcgaggtcatttcctgactcccttccccaggtcgcctgctgaccggtgactgtcaaaagaacatccacctctggacacctacggacggcggctcctggcacgtggaccagcggccattcgtgggccacacacgctctgtggaggacctgcagtggtcaccgactgagaacacggtgagggagggtggggttctggtcgtttagttctgatggattctaggccagggacctagaatcctaggtctgagggaaaagagggctgggagcctgacggaggtttagtttccaggccaagtcatagtaaggggaacagtgaaagagagagtagcccaccgctggcgcttgggcttcactgcgggctggggggcattgggaccactcagactccgcctcccccaggtgtttgcctcctgctcagctgacgcctccatccgcatctgggacatccgggcagcccccagcaaggcctgcatgctcaccacagccaccgcccatgatggggacgtcaatgtcatcagctggagccgccgggagcccttcctgctcagtggcggggatgatggggccctcaagatctgggaccttcggcagttcaaggtattttcccagccggacacctgggggctagagaagcttgctcccagcagcccctgggatttgtaggatttttcctccttgaatagttttacacaaccagagctggagagcccttagaactagactcctgcctcttcagggtacagaggaggaaactgaggctcagcaagaggaagggtggcgggtctccactcttggggtcactcactctaccaggggaacagctgacaagagatggaaggggctggggcagcagagactaggactctcatctgcctgtgggcagaagtacaggtgtctgtacggccagtgctgagagcttcagagagttgtagatttctagatgcaactgagaatcggggcccagcctgctcgttgtaggagaagactgaggcacagaaaggacaggagccgctgtgacatgacagccaagctagaggttgacattgtggagctgggagggtccctgtgcaggagaagttgcagcgtccggcatccctctggacaaagccgcagctttgtgtggctctgccttcccgggctgccatgatgtcatcctttttctcctccagtttgatcgtttctatagcgtcagccctggggaggaggctggagacggattccagcctcccaggcccaccaggtcacacagggcccagcttgttgaccattggaacttcagagcagcctctcctaatgagagagacgccaattgagcggggcctttgctgtagtgaaagtgctgtcattcttagtctttctttgggtcggcttccggggattgtgtttctgcctcctttgaggcctttgtagaatctgctgggagagctctgggagagccatgccctcctttttttctttttttttttttttttctttttttttgcgatggagttttgctcttgtttcccaggctggagtgcagtggcgcaatctcggctcactgcaacctcccgctcctgggttcaagcgattctcctgcctcagcctcctgagtaactgggattacaggcatgtgacaccagcccggctaattttgtatttttagtagagatggggtttcaccatgttgttcaggctggtctccaactcctgacctcgggtgatccacccgccttggcctcccaaggtgctgagattacagtcgtgagccaccgcacccagcccatgccctccttttacaaggaagaaaacaggcaggcagagggaagagcaggggcgggggttttgctacctgagctgggaggggcttctttgcaggtgaatcacagttcccagcaacccctgggctggtcagccttcttagcagccagaattaccctgtgtccctttcctggactctgggcttgtgagggcttaaggggtggggccctggctgaaccctgaggctggagaagggttggggcttctgcctgggtcctccccagagtcaggctgaggcattcagagcccgttcctcccatcctctccctctagtctggttccccagtggccaccttcaagcagcacgtggcccccgtgacctccgtcgagtggcacccccaggacagcggggtctttgcagcctcgggtgcagaccaccagatcacacagtgggacctggcagtggagcgggaccctgaggcgggcgacgtggaggccgaccccggactggccgacctcccgcagcagctgctgttcgtgcaccagggcgagaccgagctgaaggagctgcactggcacccgcagtgcccagggctcctggtcagcacggcgctgtcaggcttcaccatcttccgcaccatcagcgtctgaggcgtcccactggctctgatcttgcttcctgcttggaaactgaagtcgaattgggctcccctggaaggggttcattcaggtctgttgactgagactggccggcctgtgggctgccgtgatggattctgtttgacgtattgttctctagaaggcctggctctgatccagtgacccctctcaccaaagaactcggtttaaccagggctctgtaagaccactcccacccagagacttgtgtggcctggtgtggcctgtgtgtcggattccttcctgtcagctgtgacccatttgacctgtgtccccagaacccagttttttgtttgtttgtttgagacggagtcttggtctgtcgcccaggctggagtgcagtagcacgatcttggctcactgcaacctccgcctcctgggttaaagtgattctctcagctc[134 bp omitted]cggcctcccagagtgctgggttgggattacaggcgtgagccaccgcgtccggctcaggacccagttttggctgctggttcccagcaggggactcgggggatatacagtggctgcaccaaattggaggtgtgggttcctccaacacaatttgcttctgcccgttgtcttcctgccagctgggtttggccaggatttctccgtgtgggggctacatgcgaccctctcccctcctccctgactttagaggctggtgctgtgtcgggaggaaggtcagggctcctgagcagcaataaaggaccaggaagaggcctgaggtgtatttgagactctggtcctttggccacagccctatgaggaaacggggtgtggggggagtttgggggtggggaggaatttggcaccagctgcccccaggccgctaggctgggggaggccactgggagtccagtgcaacccaaccttccgcccactgggtgccgccgcgttctgccttctctaagtgtccttccatctggaactcactctggcttagtgaaaggggcctcatccctgacccccaccagcttatgaaggcttcatctcagggaactctggaccccccatttctccctccgtccatctcccctttatcacgtttctttctttcttctctgtgtccccctctttcagagtctcccgtcccccactgccagtctccctgccccctagtcgctgtctcgctcctccgccgctgtctcctgtccagcctgcctgggctgtggcccagccgctctgcctggctggcctccctggctccccctctgcggctctgagctagccccacccccggcccccctccatccagcctctgatccatctgtggactccgaggtcgggtgcccgtcacacggcccctgggaccaaggacagactacagcccctcagcacccacagaggcttcccctcagccctagccgaggagcccccagcggagggcatgggggtgggccgccccaacaggtacgtgcctccatgcaaggcaccgctgagccatcccctcctgctctgctgcgtcgcccccatccacccctgccccagcatccctgtcctcagcttgtccccttcaagaaggccttgtcttcccatcagtgacaggctcagcgccaggagaatccacccccaggttcagtgcctccaactctcaccccatccccattttatgcattttctcactggcttccatcctttcagagaaaccctctcagtctgtctgtctctgtctctgtctctctcccccatctctgtctctcccatctctctctgcctctctctgtcttcacaatttcatctccccatgtcgccatttcttaaaacatttcttttctccttttcgttttcccaattgccctgtccgcctctatcttctctgtccccctccatctaggtctctgtccccccctctctctgggtctctgtccccctctgtctctgagtctctatcctctcaaggtctctgttcccctctctctgggtctctgtcctctctcaaggtctctgtccctttctctctggatcaatgtccctttcctgctgccctctctgggtctctgtccccctctctctcagggtccctgtcctgcttggtccctgtactttttcttggggcaccctctcaacacccctcctcctgcctatctctgcatctctttgtctttctgtagtctctgctttccaacctgctgtccagcccccaccagtaggtggggagtggtggggaacacccctggtttcggaagagtgagagtgttgatttgggagggtgagggtggggcctgggggcggggcttcttggcctcagattagacagtgactttgacacgaagttgaagcaccttaagccctgtatctcctttatatggaaacattaagctgctctcgcaggtcaggtggaggatccctttccctcccgccctgcttttgctaggggaggggggtgccctgagcctgagtcgcagccagcctgggagctgggccatgttggccgcagatggccccctggtgaaggttcccgttggctttgggaagtagacaacgggtctgcctcacggggctgaggtgggactggaggatttcgagggcagaactctgggaaggaaagaaaggcttaggacccaaccagcattccccctggcactgcgggggcctggccagctcatggcgttccctgagcctgttccccaactgtgaaagggggtgatgatcttcacctcccggcatcctgagcggccaaggtgagcagtggggtctgagagtccagtgggggctgtgggcatgtcgggagctcatcacgaggcctcgtacataccaggtgtgtttgaaaccagagtgctcttgagaagactgtggtttgtcactcgggccgtggctcccaggaggcctgggtgggaggctagcttttgccactcctctccccactggctgagagacctgcgacaagggactaacctcagccccagttggcttttctgtgaaaagccaggtcccttcatcaaagggctttggtgagagatgggcaagtgggggtgagaggcccaggctggggcctggggagcacaggtcagtgtcagtgcccacctgcccccccagcccacgggggtggttcctgagggtggagtcagtgctgagtggggatccccaggctggggagggctgcaggtgtagatgctgcatcctgatgttgacctccaggccgcccccttgggcaacgagcctatttcccctttttgggagaacagtctctaacatgcagggttgtcaggggtgagatagagtcaaggttggggtacactgtgggcactggacacagccaggctggtcccctcacctcagccttgcctctgtcaagtgggcctaatgaaccctcgcgaatggccaggctgcctgcgtggttgtgggaagcaggtgcagggctttgggagacccagttggtgccaaacttgacattgtctcatggtcttctttccaaatggagtgtgccaggccctgccaagaagcccctgaggatccccaggttccagcacaaattatttaacccctggaatggtttgtcctgatccagccagttcctgggaagttccccaccacagggccaagcgtttggtaacgttgcagtgaaccctgaaggcaatgaggggtgcgggtccatgcccagccctttcctttggtccaccctgacaggctgctgcgattccctccatttcttttcttcctttattttttatttttaattatttatttattttttagagacagggttttgctgtcttccccaggctggttctcaaacccctggcctcacgcattcctcctgagttggactcccaaagtgctaggattacaggtgtgagccaccgcacctgccctcttttttttttttttttctttaagagatagggtcttgctctgttgcccaggctgcagtgcagtggtagagcatcatagctcactgcagccttgaactctgggctcaagtgatcccccacctcagtctccacagtagctgcatcaccatggctggatactttttgtttttaagatagggtctcgccatgttccctaagctggtttcagactcccgggttccaacagtcctcccaccttggcctcccagagtgctgggattacaggtgtgagccaccatgcccagcccccaggcctcctgcctttcacagatgagagctgaggctcaggaaaggatttgacctgtcatccatcacacacctagtaaatggttgagcaaactgagtctctggaaaaagaagccagagatcccaggggacatggtgggtgagcaactaagccaggactgggccctcatccatatggtaagaaggcccttcctggtcttttaagaagtcccaatttccccaccttacaatggaggaaaccgagactcagaaagagttgccaaagatcagagggtcgggcatgaggcccatttcatttattttacaatagcttcattgaaatctaattcacatatcatatcatacactcactacagggtacaattcaatggcttttagtgtattcacaattgtgcagccatcacaattaattttttttttttaaatggagtcttgctttgtcgcccaagctcgagtgcactcgtgcactctcagctcactgcaacctccacctcccgggttcaagtgattctcccacctcagcctcccgagtagctgggattacaggtgcgcgcctgtaatcaccatacccggctaatttttgttatttttagtggagacggggtttcaccatgttggccaagctggtctcgaactcctgacctcaaatgatctgcctaccttggcctcccaaagtcctgggattacaggtgcgagccaccgcacctggccagcataatgttttcaaggtttatccatgttgttgcatctatcgatacttcatttctctttattgtcaaatactattcattggatgaatataccacattttatttattcattagttggttgatacttgggtttccaccttttggctattatgagtaatgctgctgtgaacatttgtgtaccagtttttgcatctgttttcatttctcttgggtacataagtaggagtgcaattgctgggtgatgtggtaattctatgtttaaccatttaagtaactgccagactgcttcctacagcagctgcaatttttcattccccacagcagtgtatgaggatgccaatttctccacattctcgccaacacttgttttttttattatagccattctaagtgggtgcaaaatggtattcctttgtgcttttgatttgcatttctctgatggctaatgatgttgagcatcttttcatatgtttatgagccatttgtataccttctttggagaaacgtctgtacagatcctttgcctactttttttgtgcctcagcctccagagtagctgggactacagatgtgcaccaccaggcccggctaatttttggatttttaatagagacgggattttgccatgttggccaggctggtctcaaactcctgagctcaagtgatccagcttcctcggcctcgcaaagtgttaggattacaggcgtgagctgctgtgcctggccccctttgcccacttttaaattgggttatttggcactagcccacatcgtgaaaccctgtctctactaaaaatacaaaaattagctgggatggtggcatgagcctgtaattccagatactcaggaggctgaggcaagagaatctcttgtacccaggaggtggaggttgcagtgagctgagattgcgccactgcactccagcctgggccact[224 bp omitted]ggcaggagaatggcgtgaacccaggaggcggagcttgcagtgagccgagatggcgccactgcactccagcctgggcaactaagcaagactccgtctccaaaaaaaaaaaaaaaaaaaaagtttggggggtgttacttatcttttcatgattgagttgcaagggctctttatatagtctagatacaagttcctcatcaggtatatgatttgcaactacagtatcttctcccattagtgggttgtcttttccctttcttaaaaagcttttttgagacatggtcttgctctgtcgcccaggctagagtgcagtggtacagtcgtaactcactgcagcctcaaactcctgggcttaagcaatcctcccacctcaaccttccaagtaactaggactacaggtttgcattaccacatctggctaattttttaatttttttgtagagcaagccccttgctatgttgtccaggctggtcatgaactcctgggctcaaatgatcctcctgcttcagcctcccaaagcgctaggatacaggtgtgtaccacctcgcctggcctctcttcactttcttgatagtgtctttcggagcacaaaagttttttagttctggccgggtgcagtggctcacgcctgtaatcccagtactttaggaggccaaggcaggaggatcacttgaggtcaggagttcaagaccagcctggccaacatggtgaaaccccatctccactaaaaatacaaaagttagccaggcgtggtggcatgtgcctgtaatcctggctgctcgggaggctgaggcaggagaacccaggagacagagattgcagtgagccaagatcgcgctactgcactccagtctaggtgacaaagtgagagtccatctcaaaaaaaaaaaaaaagttatttagttctgatgcaattcaattgatggattttttccttttgttactttgtgagcctgtttttgaaccacagctgacctcagagccctgaggcatctctccatgctgagaagcagttacaccttacgattatgagcatggaccctggagctggatggctagcattcaaatcccagtttacttacctgtggtcttggggaagttttatttatttattttttttgagacagagtttcactcttgttgtccaggctggagtgcaatggcacgatctcggctcaccgcaacctccacctcccaggttcaagcgattctcctgcctcagcctccctagtagctgggattacaggcatgtgccaccatgcccggctaattttgtatttttagtagagatggggt[136 bp omitted]cttcagtttcctcatctagaaaatggggataatgatgtctgcctcataggcttgctctgaggttcaaatatgtaaattcatgtaaagtacttacaacaacctccaaattgtataaacagtataattgatagaacacaaattatgaattcagtacatagatttagcactgtataaatgcatgctgtaattattgtggcacttgctataatatcgttattgttatagtattttccgttgttgttgtacaagtatcttctatagtattgttgctgtttatcttccaacttggaaggtgagtatgggccaggtggggtggctcaggcctgtaatcccagcacttgggaggttgaggagggaagatcgcttgaggccaggagtttgagaccagcctgggcaacatagtgaggcccctgtctctataata[140 bp omitted]ggtgaaaccccatctctacttaaattacaaaaacttagctaggcatggtggcccgtgcctgtaatcccagctacttgggaggctgaggcaggcgaatcacttgaacctgggaggcagaggttgcagtgagctgaggttgcggtgagctgagattgtgccgctgcactccagcctggcgacaaagcacgactccgtctcaaaaaaaaaaagaaaagaaaagaaaaaagttaaaaaaaaaattacccaggagtggtggtgtgcacctgtagtaatcccagctactcaggaggttgagacaggagaatcgcttaaacttgggacgcggagattgcagtaagccaggatcatgccactgcactccagcttgggcgacagagcgagactctgtctccaaaaaaaaaaaaaaaaaaaaaatgcgtatcgttccacctatttgacagatgaggccactaagccccaccagaaagcatgcttggccgatgagctcatccattcctgttgcccctgacgtttctgccggtttcttgtcccagcaggttgggggcgcctgccccccactaggccaagtggagggggtccctccgtccaatgggcctggccagggccctacgccgcctcagcggcgccctggattcgggagacagccgggcgggcgatgaagaggaggccgggcccgggttgtgccgcaacgggtgggcgccggcaccggtgcagtcacccgtgggccggcgccgcggtcgcttcgtcaagaaagacgggcactgcaacgtgcgtttcgtaaacctgggtggccagggcgcgcgctacctgagcgacctgttcaccacatgcgtggacgtgcgctggcgctggatgtgcctgctcttctcctgctccttcctcgcctcctggctgctcttcggcctggccttctggctcattgcctcgctgcacggcgacctggccgccccgccaccgcccgcgccctgcttctcacacgtggccagcttcctggccgccttcctcttcgcgctggagacgcagacgtccatcggctacggcgtgcgcagcgtcaccgaggagtgcccggccgctgtggccgccgtggtgctgcagtgcattgccggctgcgtgctcgacgccttcgtcgtgggtgctgtcatggccaagatggccaaacccaagaagcgcaacgagacgctggtcttcagcgagaacgccgtcgtggcgctgcgcgaccaccgcctctgcctcatgtggcgcgtcggcaacctgcgccgcagccacctggtcgaggcccacgtgcgtgcccagctgctgcaggtgcgcccgggaggagaggcggggacttccgtgagccctgggggattgtgggagatgtaggcccgagggcgaggggcgtgcggtcctggagggggcgtggactacaactcccagcagcctcttgggcctggggcctgcgaatgggtcactgggcagctggggatgtaaacccaacagaaaggtatgtgaccagctcttcctggaggcctggatttggggcatacagagcttcctgtggcttgaggattgcccgcctgtgggtagaccccaaaagggccacgcctggcctgtcaaggctctgggccgtaattcccagaagcctctgggtcaagggacctgtccaaagatggggtggcctcagatgcagctttgcgagggggtggtggagggcctgcgtgaccgttctattactcgggtgtacaattcccactggacactgtggcacagtcggaggcctgtgacttgaggcccccgggagaagcaggccctggaatgggtgcagctcatcgctgtggagcacagttctccaggcctctaggtgtggggtcctgcggcatctgtgggagaattcattccccacctcagtggcccattgtgtcccaccagcctcctaacctctgagagcagggtggaggtggcaacgaaacgaaactgcacctcccattggcccctggggtactggctccctccctgccctgaggaaggggccttagcgttcctagaattgtggtcaaattgctcaaacatctccgttcccaagaaactctgggccggcagctgccgtggcccaagtaaagtgactttaggactctgggctgaggctggacttggagaggatcgggggtggtgggagctgcaactcccagccgcctctggggttcctctacttggggcttccagagacacttacaagaggaggatagatgcccacctcccacttcaatctcctgcctgaagctttgagataccaggattcatgaataggagggacactggctcttgcagaagtcggtggggcagtgacttggcctgggaggtggctatggaaccagcgggtaggcgggggtgaaatacccacacccccacaaagcgtgctcacacacagaatgacatggaagggtttgcagttgccctgacagctaggatagctcaggggagagcccagggataagcctgaggcagtggtgggtgcagaatgttggacctaggttgccctaactcccccttcttgtcatctgatttatctttctctggccacatactaaaagccatttttctctcccgctccttctccaattctctgttgaatgtcatccttattttccgttgtcgctttgatttcatctctgtcttgctgatttctgtgtctctatgccaatatcactctgtccctctctcctcttcccccaccacgcccctcttcccgttttctacccccaaaccctgagtctctttcctctctctttatctctgggtctctgtcccatgtcccatgttttctctggacctccatcctcccctcctgggtctctggctcccttactgggtttctgtgccctcccctgcctctctgacttcctctctctctgggttgccggccccatctcttgatctgtgttctcacccttttcttcactcctgtggtctttgccttctttctctgcatctcttcctctctctcacttcgtctctgcccgtctctgtgctccctgctgtctttggctcctcgcctcctgctgcagccccgtgtgaccccagagggtgagtacatcccgctggaccaccaggatgtggatgtgggctttgatggaggcaccgatcgtatcttcctcgtgtcccccatcaccatcgtccatgagatcgactctgccagtcctctgtatgagctaggacgtgccgagctggccagggctgactttgagctggtggtcattctcgaggggatggttgaggccacagccatgaccacacagtgtcgctcgtcctacctccctggtgaactgctctggggccatcgttttgagccagttctcttccagcgtggctcccagtatgaggtcgactatcgccacttccatcgcacttatgaggtcccagggacaccggtctgcagtgctaaggagctggatgaacgggcagagcaggcttcccacagcctcaagtctagtttccccggctctctgactgcattttgttatgagaatgaacttgctctgagctgctgccaggaggaagatgaggacgatgagactgaggaagggaatggggtggaaacagaagatggggctgctagcccccgagttctcacaccaaccctggcgctgaccctgcctccatgatgcaaactgatgtccccttccccgtgtatgcccccttccccaaggtagcaagatggagggatggggctctctcctgggatgggggcaggtgttcctgaataccgacaggcctgctgggtaaatgactaggtggtaaggttctgccatgcctggtgacccaccatggacatactggaccttaattcctctgcttctgtgctccctcctgagaaccctttatgagcctgattcctcagtctcaccagaattctggatcacccaagaggaaaagactggcagttctagattcctctatatggggagacctggattgttgaccagggtgagaagccaatggtatagactgcctctggggaagcaagttggcagttcttgaacagcatcagatatcaagagtttgtaggtctggattcacctaagattcaagggagtgttgcttctcaactcagccaactgagtagcaaatcatttgttctagaccacctaaggagggaaggttatggaatgccccaagtattcaagatcatcttgattgaccaaagaccaaaaaaaaaaaaaagacctgtggttccagaaagctcattagttgagattctgtgagtctaggttgaccacagaggcaagcactggtgagtctaggacagattttacgtggagagttgaactactccagaaactaaagagtaatgtttctagaatgcacaaaacattgttagtctgtgggtttagaaagactgaagtgacagattaagagttcttgatattagataactccaacttctggctgtagagcacccagccaagagaataagcagtgctttgaaaggatccactgggtgggttgtttttttttaaagtgccattctagaatgtccaaagggaatcaggattctgtggctgtagactgatcacagagtcaaggaagcagtggcaattctagatatctgagattttgctggttccagtttgcccaatggagttgagaatctcaatgattctagatgacttcttgtggttctgtaatgccaaaaggaatgaaggctccagggatacagagttgtccattaccaaagcctggaagttctcatcacctccaggtggactgcttggcagtgctaggaggtggactcaggacttcagaagcaacatttctggcctgacctggaaggtgaaggtgaaggtgagaccctgtagggcacagggctaattagtggacaagggaagggggaggcccagggctggtgagtctagaatgctctggaaccctacacctagtgatgtgtgtctatttctttttctttttcttttttttttttttttgagactgagtctcgctctgccgcccaggctggagtgcaatggcgtgatctcagctcactgcaacctccgcctcccggcttcaagtgtttctcctgcctcagtctcctgagtcgctgggattacaggcatgagccactatgcctggctaatttttgtatttttagtagagacggggtttcgccatgttggcgaggttggtcttgaactcccgacctcagatgatccacctgcctcggtctcccaaagtgctgggattacgggtgtgagccaccatgcccagccgtgtgtctgtttcttaaagatattatacatatgtatattatatatatgtaatataaatacagatatctatctattttttcccttggtccctacaacaggcttagagatggagtgctagctaattggaatgaggtccttttcaaggaccccagaagctttgctctaaatcccaatgctgccccaacttactgtgtcactttggactcctcttcatgtcagtttccccatctgtaaaaacgggatattggaacttgaagttcttcaggggcctttccagcaggatgagtcctcactacaccaagggtgggatgggcattcgagtcctggggatttccctcctctccccagtgctggatcatacggccttccaggagacgctgggatgtaagatactcttggaggctggctctgaactcgggtgtctgaatcacagggcaagggtaggcgtgggctgtggctaacagccagagtcacttccctggcctagcttggggacctggggaggaggaggtagctctggacaccagggttcttcccattgtgggagagtgagtgttttagggggagacctgtcccccagattaaagaactgggagccctagcggatgtgtctgcgaatgtgtttctcgagcatgggtcctccgacctggccccctgcccatgctaccatctacctaagtgccccgcaggctgggagccaactgcagagggagccagtgacagtgaggaggacgtgttcccaccccgtgttctggaccgagggcagccactgtcattgccattcagccttcacaagtgctgcatcaacccaaatgccccctccagcttctccatctccctttatccctcagaatccccatgtaataaccggatgggattaattagctggctgctctctcagctcagggtgtctggggtaggtagggatgggggcaatggaaacgcagggttggggaaggatgttaagttggaagtgaaggggcagggagggggtttcgtttgaaaggagtatgggagcagggcagcccagcctgggtttccactggggagggcagggcctgggccactcataaaggtcagtgaggggattaggagcctccatgtctaatccgacagcttaactaggtcctggccctgaatccgtctccacctgcccagcccagggacagcaaatgaggacgaggcccagacaccacttcagcccccattacggcttccctctttacaggggtgcctgggttccctattccagccagtcccttgaccacattccgttacaaataatgggacatagaggctggggaaggggaaggggaaggggcctcagaggagggaggagtttaagaagggcaagggtggctgggcacggtggctcacgcctatgggcacggtggctcacgcctagcactttgggaggctgaggcgggtggatcacctgaggtcaggagtttgagaccagcctggccaacatggcgaaaccccgtctctactaaaaatacaaaaattagccgggcatggtggtgggcgcctataatcccagctccttgggaggctgaggtaggagtatcgcgtcaaccttgtgggtggaggttg[133 bp omitted]gaggaaaaaaggcctctgagatgggagaaggaatcagagaggtgggaggatgctgaggaaaggggagttgtcttagcaggaggatgcttggggaagggaggagtcttaggaggatgctaagctaaaggaaggagtttggagaaatgagggaggagtctgagcggcagaaggtgccaggaaggccgagcctgtgctttcactaaatttcaccttcccctgttccattccccatgaccgataccaaatagcatagcatttagaaaaaagtaaatcttggccaggcgcggtggctcacgcctgtaaccccagcactttggagggccaaggtgggcggatcatgaggtcaggagttcgagaccagcttggccaacatggtgaaacgcccgtctctattaaaaatacaaaaaatagccaggcatgcaccatcatggtgcaaccctgtaatcccagctactcgggaggctgaggcaggagaattgcttgaacccgggaggcggaggttgcagtgaaccgagatcgcgcaactgcactccagcttgggcgacagagcaagactctgtctcaaaaaaaaaaaaaaaagaaaaaacgaagaagtcttttgtttcaccactccacgactccgaagaggctgagggggatggggagggcatagatggtgataaagaaggagttcggcggtaagaaggggctgagaggaggggaaatacgcggagaagaaatgcaaaagaaaaggaggcctaaagccgctcccggttgcatggcaacctttgcggtcagaagccagcatggcctgctaggaggtgtggcttacggaaacaagccagttctagccccgcctcctagcaacaagactaacaaagtaccgccccctagcaacgtattatcggaggcggggctcggtttacctagactccaagtgtccagggcctttgagcaggcgcagaggtggctgtaccgcgtggctccgcctccgcgcgacacttttccggggcttctcattggagagcaagcctgtcaagtgctttctgttgtttcggaggcggggcctgctgccctgcctgcactccgattggccccgcgggccgtctacctctggccggacatacctacaccggctttttgtacgactgttggccctggagaacgatcctttggtggcgagggcggggaggacgaaagcgcccactgtggattggacagtgtcaaaaagaggggcggtccctactgaaggggcggttgggcgacgaagggaagagtcttttcagcgctgaggactggcgctgaggaggcggcggtggctcccggggcgtttgagcgggctcacccgagcccgcgggccaacgcggatccaggcccgactggcgggaccgccccggattccccgcgggccttcctagccgccatggaggacggcgtctatggtaggtcggggaggggcggggtcggctgggagttgctggagcgttttctcctgaacgttccgccgcgaacgtttccccctggcgcgcggcgcccagaagcgttcggctcagtcgtagacttgtcgcgccgcttttgttgggcgctggacgggcttccggcggggcccgaaagccgggcgttccaggccattgtttgggctgagcctgtttccggtggcggcgggaggggcgggatggagtggtggaggcgaggccggggcggaaccattcccgctggaggggcgggcgagcccagcgcctgccggggccggggaggggcgcttgggttgcggggaggggagaaatcttggggggcgggggccttcgatgtcccgccccaccttcccaactctcctgagctgtcatcagttcccccggctgtagtgacttttcatggacccagtagtccggataaccaggtccccagctacctcgccagtaatggagtcagaaaaccaaggcctcagtccccttccaagtaatggacctagaagccgaggcccccagccctttcttccctcagatctaagagctcaggcacccattccccttctccctcagactcaggaatccgggccccaattccccttgtcccccaggactcaagagtttagagccccagctctttctcctctgcagggaggaatccaggcccccagcccattcttctgtgcagacataggaagccccttacacatcctctcccagctctgtccgcccccagattgcaggaattcaggctcacggcccctagcactgacttttaaaccttgaccccgatccctagaacccccagacctgactccggaggagcggatggagctggagaacatccggcggcggaagcaggagctgctggtggagattcagcgcctgcgggaggagctcagtgaagccatgagcgaggtggaggggctggaggccaatgagggcaggtgagggctggggcggatgacctagggggcgtggggttggctgaggccagggatgcccaggcattgaccctccacccccaaccctgctctctgctcctgcagtaagaccttgcaacggaaccggaagatggcaatgggcaggaagaagttcaacatggaccccaagaaggtgcttggggccacaggactgggatcagctgggcaaacatccaggcaggggcttctggcacctccgggttccagaagcgtgatggtgccgggtctattctaggtggacagacttggtcctaatccctggattcagatactggctgtccatttgttttctgaacactgaacactgaccaagtgttccagccctcctgactgttttgtcccctgcctggaaggtcgtcttccactttctacttgtatgggcgcatttctggtcccaagatgagctcgagtcttgtaggggctgtggacaaagtgacatgcacaaaggagagttgacctctctcccacaaaggtgccgtgacggaggaaggtatcagggtagtggacctctggaggaggcaggctggtggagtcagggagggcttccttgaggaggagacattcaggtcgggtttgaaggatgagtaggtgttcaccaggtggaggaaaggcttttgttcacctactctttgtgtgtgtgtgtgagacagagtcttgctctatcacccaggctggagtgcagcgatgtgatctcggctcactaacctccgcctcctgcgattctcctgcctcagcctcccaagtagctgggcttacaggctcccaccaccatgcccagctaatttttgtatttttagtacagatggggtttcaccatgttggccaggctgcttccaaactcctgacgtcaggtgatccgcccgcctcagcctcccaaagtgttgggattacaggcatgagccaccgtgcctggcctgttcacatactcatttaacacccattttctgaggcctctcaagagtctgatcctgtgtagggcaatgctggggacccaaagaagaattagatgctgccttgtgctcagagagcccttggacaccgataccacagttcacagtgagataaagcagtagtagagaggtcttcgtagcacagagagtgagagaaacctccagtctagccagggcttcgagttcacagcccttgaaggactgcgtctgctaacaggttgtcacgttattctttcctgaagcaattggaattctgttcagtcattcaacaaacattgattggctgggttcggtggcttatgcctgtaatcccagtgctttgagaggccgaggagggaggattgcttgaagccaggaatttgagaccagcctgggcagcatagtgataactcatctctagaaaaaatataaataaataaattagccaggtgtgttggggcatgcctatagtcccagcttctgaggaggccgaagtgagaggatcccttgagcccagcagttcgaagctgcaatgagctgtgatcacgccactgcactccagtctgcaatagagcgagaccaggtctcagaaaaaagagaaaatgtactgagcacctgtgccttgccagaccctgttgttggtgctggaattaaccaggcaaaggcagagagggtaggccatgaagtgcaaaggccatgagttgggaagaatgctatttaagacctgtgagaaggctgaaaatgaaacctggccctggtctgttgagggtgggggtaggtctggatgctgaggttcccagggaggtgagtggggtggctttctggccctcagcactgagaccttgtccccacccaccaggggatccagttcttggtggagaatgaactgctgcagaacacacccgaggagatcgcccgcttcctgtacaagggcgaggggctgaacaagacagccatcggggactacctgggggagaggtacggtcaccactcagctcctgtggggcccctccctcccaccccccagacccagctcctgccctcacactggcagctcacaggtggaacagccctgcagcctccccgcagaggggccctggcagatcagccttctgactggactgtgacagaatggactgacatgggctaggggagcctgcggccaaccgagagcatctggggatgtggggccttctggaattacctggcagttgtggggaagcatccatttatgtctgagaagggtagagaacatctctcaaggatcatgggagcttgagaaccgtgggtagaccatggctgtgcataggcactgggtggccatctgggagctgtggggaccgctgggcccttgtgggagcttaggagttgtgggggtcatttggaagcctagggtgcacaggactggacatcagatgattggaggccatctgtggacgtctgggaatcagggatttatagagatctggggtgcttgggaagcatctctggatgtctgggggatgtgggggctgtgtctggatacctggggagcatggggatcatttgagagaggtgacagtaggtagcatacatgtttgcggcatttctcccaactgtacaaaggtctggcctaagcagggttcccaagccagatattcctcccaagagtgtgttctgagcatcccccaccctgggggcaggcctgtgtgggagtccagcaggaaacttcaccctcggcagtgggcagctgtggtgcagtagagggggcacgacttccccagggcattgccctttgcccattcctgccccatcctttccaaactgtatgtgtctttgtcccatccttccagggaagaactgaacctggcagtgctccatgcttttgtggatctgcatgagttcaccgacctcaatctggtgcaggccctcaggtgagtgagggggaggggtttggaacgccaggaatgtacctgtcagggccttcctagttacaagtgacaaaccttactcaagaaaaaaacagaaacaagcaaaacagaaacaaaaactagggaactgagtgtgtcctgcaccataaaagttcagggttatggcctccttcaggtatggctatatccaggagctcaaatggtggtcagaaagtcgactttctttgcctcttgtatttgccactgtgtcagcattgctctctgcagacccgcttacctgataacaagcctcaaccaacccccagacctgtctagcgaacttagcagaaagaggctatttctgtagggattcacaacactcccgtggccaatgcccattggtgagactggatcatgtgaccatacctgaaacaactgctgaggccggaaggtcgggattcctcgtggaccagttcctaacacagggactgagagtggggacaggctcccaccagccctggcatccattcctggcccctccccaacccaggcagtttctatggagctttcgcctacccggagaggcccagaaaattgaccggatgatggaggccttcgcccagcgatactgcctgtgcaaccctggggttttccagtccacaggtgcgggccccaaatcctgggtcctgggaaagaggagactggggcccagactcctaggtctgagggagggagggggctgggagctgggaatcctgggtcctggggaatgggggcactggggactgacatgcctgggtcgtcaccacctgccctgtccggtgcagacacgtgctatgtgctgtccttcgccgtcatcatgctcaacaccagtctccacaatcccaatgtccgggacaagccgggcctggagcgctttgtggccatgaaccggggcatcaacgagggcggggacctgcctgaggagctgctcagggtcagtcccccttccctgcccctcagccctgcccctcttcctgccacagacacccccgccccacctgtggtctcctagtgcccaagctgtctgccctcacccccaagatggtgcgatcatgccaactcgtgtgtgatctttttctctctctctgggtgcttctcttcttgactgtctctctcaggctttggccctgacaattttggcctgtctgtcttctctgtctctggctgttgggctttccggccctcgattggcctcattccccatctgtctgtttctctgaggacgtagccggctcctccacctatcaccagggcatctcttctttcctccgccacctcagcctccctccacttctctgcctttcacttccctctcctccccactacccctctctcttccccactatgagtcatcccatccctggtctcgctgccccccaccctgagtaaccctggggggccccagggggctcgaatggctaatgcagcctttactcctcagaacctgtacgacagcatccgaaatgagcccttcaagattcctgaggatgacgggaatgacctgacccacaccttcttcaacccggaccgggagggctggctcctgaagctgggtacgtgccctcccgaccccgctggtccctccgcaggaggacatttgtgggcctgggccctggactcagcttccgcacacacctgctgcctgaactgaggcaaatgattcgacctctctgaacctcagttttccacacccaaaaaatggggctgaaaataaaatcaggcctgtgtgctgggcctggcctgtagtaagtacttcccaaccccttctcttgacccacaaatgttgatggagcccttctgtgccaggccctgagctgggctgaggaggcagtgagaggcagctgacattgtcctttcgtgggagaagagttcactcaggcttctttccactgcgttaacccagcccgagggagccaaacccctggaatctattccccttggcaagaactcccagggttccaggcaggactgaccccgcactccgaggcatcaggcccagagcacttggctgatccaggtgccatccttcccgaaacaccacccacaggcagaaaagagccaaacaggccaggaaacctgtcccagattctggcttccagctgtggagggaatagccagggctggtgcagatgagtcgggaaacccagcagagatggaggggggagtcttcgtcataacacgtggcactggcacattcaaggtcggttagcatggatcagacaggatcgtagcatgatgaggggttagcacaaggactagagtggttctcagccctggctgtacatgagatttgcctgggcaactcgaaaactccggtggctgggccatagactcctgaagtcaggctctcaggagcagaagggccatcagtcatcgtttaagctcctcgggtgctcccaatgcatagtcaaggttgagagctactggcctggagccgtgcctggtaacagtaggtgccacctgcgtgttagatgtggtttataatggagacacggtgcacagctgctccagagagacacatctgggcagttacagtccagcacagcagtggaggcttcccgcggcagcaggagagcccacaggaagctttcagctcagtgaagggagtcaaggtcaggcttcttggaaggaggttggacagggcagctttggcctctgagtcttgggggcctccccatgtggaactgtgctcttaaaccagggcatcaccacctcaacagatgccagggtttcctggtaaatgtaaaatacacaagtcaggcagggcacaggggcccacccctgtaatttcagcactttgggaggacaaggcaggaggattgttagaggtcaggagtttgagaccaacctgggcaatataatgataccccccatctctacaaaaaataaaaaaattagccaggcatggtgatgtgggaggattgtttgagctcaagtggtcgaggcttcagtgagtcatggttgcgccactgcagtccagcctgggcaacagagcgagaccccgtctctataaaataaaacatgcaaatcactgtccagccaacaccccagtccagatccctgcattcgatccaagggaggcagactgctgggggaaattgagagtcctcgaggtgcccctggcagtgagcgggccagaaagagaagcaggaaggcgccagcatcacgaggaactgcttccctcaaaactgctgtcaggccaggcacggtggctcaggcctgtaatcccagcactttgggaggctg[134 bp omitted]gaggcacaagaattgcttgaacccaggaggtggagcttgcagtgagccgagatcacaccattgcaaatccagcctggacgacagagcgagacagtctcaaaaaaacaaaacaaaacaaaaactgctcctgtgagcagtaactttcccatttcccagaggctcacgcctcagtttggttctgagccccacctaaggctgcccagccccagggacatctctgaccaaagggcctctgttccctttgtgccagttagagggaccccttccttaaaagatggaaatacaggagtggagattggtgatggtggttgctactccatgcctaataaaagccattcttactgtcattgtttaaccctgggcccacaaggaagccagcagcaggtcattttgccacaggaaggtgtaggcccgagtgagtctccaggctggagtccagagagtccaagagagtgccctgaggtcacacagccagtttgtgcaggagctgagatgggccctcacacccacctcagaccaagggctgggggttttgccttctgtcctgtgggggcctcctccagggcagaggcacttttaccatgtcaagggaggatgctcctggcctaggacagaccctagggggtaggctggggccctgtaccgaagcaaggggttttcaaggctgccacccggggctcatggcccttggcctctctgggagggaggagccccggccatccccaccctcgtggatgtaactggttttcttccctctctctccctcccctcctctctgcgtctttccctctctcctgtgtttgcctctctgtcctgcccctgcgcacccctccctgtgcccaccctgtttctgtcgcctgcggctcttgggggtgctccattctcccgccttcccttctcctgcacctggtcctgcctgctttctcgctgtctgccccaggaggtaggtacacgacctgtctttgtctcccatcactagacgaggggagggggctgccctggcgccctggcgccctggcctcctgcccacaggaggagggggctgggggctcaggctcctgggctgggactgacagactcagaaaatgtggagccccaagctgggggtggacgattcctggagccccaacatgcctggccctgcttgtctgtctcccccaacgcagcggctttgtctaggccccaggagccccacctctaccgctcttgctctgcttctcacgcccctcccatctcccagaggccctgtccccctgttgagcccaggccccctcccaccccttccctttcagggggccgggtgaagacgtggaagcggcgctggtttatcctcacagacaactgcctctactactttgagtacaccacggtgagcgtgacccgacccgggctctggggtcctgggcggagtggctgggagcctggactcctggggctgagggaggtggggtggggtgaggacttggaagtctgagttctgtccaccttgcttcttcaggacaaggagccccgaggaatcatccccctggagaatctgagcatccgagaggtggacgacccccggaaaccggtaagaccctctctgtacaccttcctgccagggcggggcctcctctgcccagggctggttcttacctgcgcccttcctctctcgtccccagaactgctttgaactttacatccccaacaacaaggggcagctcatcaaagcctgcaaaactgaggcggacggccgagtggtggagggaaaccacatggtgtaccggatctcggcccccacgcaggaggagaaggacgagtggatcaagtccatccagtgagcctggactcctgggcctgatggaggaggggctggggcctggactcctgggtctgatggaggaggggcaggggcctggatgcctgggtctgatggaggaggggctggggcctggacgcctgggtctgacggaggaggggctggggcctggactcctgggtctgacggaggaggggcaggggcctggacacctgggtctgacggaggaggggccgggggcctggacccctgggtctgacggaggaggggccgggggcctggactcctgggtctgacggaggaggggccgggggcctggactcctgggtgtgagggaggaggggccgggggcctggactcctgggtctgagggaggaggggccgggggcctggactgctgggtctgagggaggaggggccgggggcctggactcctgggtctgagggaggaggggccgggggtctgagactcctcctgggtatgagggaggaggggctggaggcctggactccttggccctcatcctgggacccctccccttctgcagggcggctgtgagtgtggaccccttctatgagatgctggcagcgagaaagaagcggatttcagtcaagaagaagcaggagcagccctgaccccctgcccccaactccattatttattacggagctgccccgcctgggtggccggacccctgggccttggggctgtggatcctggttccctgtttggaaaattcaccacctctagctcctcactgttctttgtaattaacacgctgttggtaatcttattaattatttaaccacttggcctgctgaccccctcatttcttggggttgacagagtcgaggtgctccgtggagccagcctgtttccctggacaggggcctggacccgcctgtctctgggtgctgcctgggctgtcccggtgggtctgttctggtttcaccccgagcccagcaggagtggagtaaagggagaaggttaatatggtgggagtctggagttggaattggccggggacagagtttagaatgcagggattcagggtcaaggtctagcattcattctagaagttacttgacagccatcagccagttacgctacagccatcagctagttcccatcgttgctttcatggggcttgaggtctttgaggggcaggagatgaagctggtgaggttgtgagctgggccagggctttgaggacaacctggagctggaagaacatgcgaccacctcagggagggtcagggaaggatgagtggggaggtggcccatgtcctgcaagggccttgctgatgggatgtcctgaagggctgggcagccttagatcgggctaagagggcaggactgtgggccagtgccagagccaggcttgtctgttctcaaaggatcagcctcctttggaggacattttgtgtcaaggatagggctgaggacctgcgttctgaacgtctttcctgggattcttgacagccaaagaaattcgaggatcgcctctatgaaggtgaagtcttggcatgtggggtacccctgaatcctgggctaaggtctgtgaccttttgccctccagttggggtatgtgtggtgtccccaaagaacaagggctcgtggatcccgagcagggtgcgatggcggattgggaggtcccatgtcactctcccatgcccgcctttgaagctgaggcgctctttagttaacaaactacaagtcccagcagggaccgggacgcgggtgggagaggcgcctgtggccccgaggcgtgccgcgagttgtagtccctcctgcccgctgtgttcgcttttgagctctccgatgggatgcggcgcttcggaatttcgggctttgatccctgtcccgcccttggccacaggcacctgccggcctgaaggcccccgcggtgggggtaccctgcgcccctccgcgggaaggtggactacagttatcggcaggctgtgcggcgccaaagccacggtgacccagacccgaggtttttccgggcgtcgcagtttcccgagactccgtggcggcgtttgtcttctttttcttagtcagatcccgtacttttgtggagggtagaggaggctttgaccgccgcggccccgggggctggtgggaaatggagttccaaatgagaaaatagaattccccacttctctttcccacaggtgccagggaaacggagtcatcgacccaagaaggtcgtgggagatgaggtcccagggtaaacagcgggtcccgccactatgtcaccctttcctgccgcctccccggatgaactgcatgcagggcggccggctccgtggcaggcagaggcaggaagaggcgcggagcccgctggtggcgaagaggggagtgcggcgggaggggagggcagaggcaggcggccggtcgcgtggggcctgggccgccccaggagggcctctggctggattcttagcagatggaagccgtgcaagggcaggaggcaggggcctgacgtgtttggattgaggttgcaggaggggcccctggctgcttcagggagaataatttggaggcgagcggggaggtgagaggaagctgtgcggtgcaggatggcgtggctgtggaggtggagaacgttgggccacgctaggagtcttgaaagaggagccaaaaggacttgctgagagccgccgcagctggtgaatgacggtgccatgactgaggtggtcgaaagggagtatttaaggggaaatcaggcattccgttttgaccaaattaagctggagatgcctgtggaacattccagccaggctgcatcacgtcacactgaccttcagcattgcccacagtccatcttcccccaggacctgaggattttgcgtccggctccctcctcgcccaggacccccaagctcccagcacgcttctgattttttttgtaggtttttttttttgttttttgttttgttttgttttgtttttgagagggagtctcactttgtgccctagactggagtgcaatggcgccatctcggcttactgcaacctccacctcccaggtgcaagcgattcccctgcctc[134 bp omitted]cagcctcccaaagtgctgggattacaggtgtgagccaccgcgccaggcctcagcccacttcttttgggtggcaatggtttggatatcgtttgtcctcactaaaattcatgttgagattcgagccccagtgtggcaggtgttgggatgtggggcctcataaggagctgtgtggtcttggaggtggagtcctcatggatagattaatgcctgccttaaggggtgagtgagtgctcacccttgggaatttgggaatttggttttctctcccttgcttccttcagcaccatgtgatctctgtgcacacagctgcatccttctgccctcccccagaagcagcagcagcctcagggatgagggaggtcctcagtgagtgcacctgcccagtcttgaaccttccagccatcagaatctgagccaaatcaacctcttcctttataaagacccagcctcaggtcttctgtcagagcaacacaaaatggactcagcacggatcaaattgtgtctcccccacccccacaaaaaactttatattaaaatcctaacccccagcatctcagaatgtgatctgattaggaaataaggtcattgcagatataattagttcagatgaggtcattcatgtgggccctaatccaataggatgtgtgtcttataaaagtttgtacagagacccagacacacagaaatgacaccatgtggaggtgaaggcagagattggggtgacgcctctacaaaccgaggaaaaccaaagctgccggcacaccctcagaagccagagaccggggactcatcctccctcacagcctcaggagcagccagggctgacaccctcatctcagacttctgacctccagcactgggagaccttcagtttttgtgatttaagccactaattttgaggtactttgttatgtcagccctagataactaaccactcctccctcagacccaggagtccaggcccagccccttcttccctcagacccaggagttggggaccccggcccctcctccctcagacccagaagtccaggccccagcccttcctccctcagacccaggagtccaggcccccatcccctcctccctcagacccaggagtccaggcccccatctcctcctccctgagacccaggagtccagacccccatcccctcctccctcagacccaggagtccaggcccccatcccctcctccctcagacccaggagtccaggcccccatctcctcctccttgagacccaggagtccagacccccatcccctcctccctcagacccgggagtccaggcccccatcccctcctccctcagacccgggagtccaggcccccatcccctcctccctcagacccgggagtccaggcccccagcccctcctccctcagacccgggagtccaggcccccagcccctcctccctcagacccgggagtccaggcccccagcccctcctccctcagacccgggagtccaggcccccagcccctcctccctcagacccgggagtccaggcccccagcccctcctccctcagacccgggagtccaggcttcagcccctcctccctcacacccgggagtccaggcccccagcccctcctccctgagacccaggagtccaggcccccagcccctcctccctcagacccaggagtctaggccctggtctttcctccctaaggcccaggagtccaggcccccagcccctcctccctcagatccaggagttcaggcccagccccctcctccctcagacccagaagtcctgcccccagtcaccagcccttcctccctcagacccagaaagtccagctctcaccttccccccgctgccttggttcatgcagcacccacccaccctgtggcaggtgtctcaggatcacttcaagcaccaccaagtctcccagcaggacttattgggaagaagctaaaaccttatcctctctctccctttccccaatcccccaggactcacatgtgaccctaatgccgccatcaccttaactccgaggccagagtctacactacagcctccctaacagagggaaggggctgggttcccaccccttgctccttccctctccccgcatccagactacatcccgcaaatacaccagtgaacctggtaccaaggtgatgggggacaggtcaaggccaagagatcagagccacaaagacaaacccggtcagagggaaaaagacagagtcaaaacagaatccgggagaaaccgagaacaagaaatagagacagcctggcgtggtggctcacgcctgtaatcccaacactttgggaggccaaggcaggcagatcacttgaggtcatgagttcgagatcagcctggccaacatggtgtaaccccgtctctactaaaaatataaaaattacctgggcctggaggcaggcacctgtcattccagctacttgggaggctgaggcaggagaatcacttgaacccaggaggactgcagtgagccaagatcgccccactgcactccagcctgggtaacagactgagactccgtctcataaaaaaaaggaaatagagacaaaagcacaaggcagaaggacataatcgagacaggaggaggtgacagggagacacagacaaggagaaaaatgtggaggcagggaggaactcgagacaaaaacatcgaaatagaattagacagggaggaggaggccaagagcaagagactcagatggggagacaggaaaactccagatcagttggagaccaaaactggggcagggtgagacagggagccagaatgttggaaatgagagagagccacacagataggtgcggttagggtaaagacaagggatgagaatgtcagcgaggtgggcggtcgcatggaaaaacaggtaaactgaggcagcaccacgctgggtggggaggtagaccctgaacttcaaggaacaggcagtgccgacctgaggtgggtgggatgtgatcgtgatccagtgtgggcatgagcagctcatttctgagcccctgccccactagcccctggccctgggatagcgtctggccaccaccgcgggccaccttgcagaaacgtggctctgaccgcagcctgcaccttcccacccaaccccagtgggctccttatggttttttgtttgtttgttttttgttttttttttttgagatggagtctcactctgtcgcccaggctggaatgcagtggcacgatcttggctcactgcaacctccgtctcctgggttcgagcgattctcttgcttcatccttatggcctcttgagccagcagtgctgctgctgcagcggccaaggttgggcgatgcaaaccccaggcgcagagccgggatctggagaagcagagaagccgggcctccgccactgtgcgggagtttccgcttctctgagcatccgatgtcccatctgccatgcgggccaggctgtgaggatgggacttctcagggtcgcactcgctccctgcatcctcccctcctcacctcgcgaaatacgcacaggccccgtgttcctccaaaaagttgtttttgtcttttttaaataatgtgaaaatgccacgcgaaggtttgaaccagaggcccctccaggggccgggctggggagggaaaggggagacgcgaaatggggggtccgggtccccgaagcctgcggcccctgtcttgggccaggagtgggtgaggagggacctccgctgtgtcgaggggctccaggcccaaaagagttcagttcagttccgagaaaggcggctctctatggaggggcggggggattcctgcctcatttggctccgagggggtcaggggggtcaggggagccatctggggggctggggggcgggggcccggggcctcccgtttggcacatggtaggggagtgggagggggagggcccagcctcgggggcctccccagaggcggcgtctgcggtggtggcagtggcgccgtcatccacagaggattccattctcaacccctcttctgagggtgcagcggggtcgggtcttcggggaatcaattctccacggggcctgaggatggacagaggagacagagaaatgaaattactagggggacagcctcatggcttctaggtcactcagcggaaaagcaaagccctcacccaccatggcccaaaagatctgctctgttccctctctgtcctcacctacccctcttctcccctctgctccagccactgggcctcctgctgttcctccagtgctcccagcacggtccgacccctgggtctttgcacatgctgttcccgctgcc[367 bp omitted]cgtcccctccacagagtccttccccaaccatactgaatcaagcagtcacccctgcacgctcatctttctcactcatttccctctgactggtttgcatttgtcactctgggatgaccctgtccttggttttgttgttgttgttgctgctttgttttgagatggagtcttgctctgttgcccagactggagtgcagtggcatgatctcagctcactgcaaactctgcctcctgggttcacgccattctcctgcctcagcttcccgagtagctgggactacaggtgcccacgactacgcccggctaattttttgtagttttagtagagacgggtttttactgtgttagccaggatggtctcaatctcccaacctcgtgatccacccacctcagcctcccaaagtgctaggattacaggcgtgagccactgagcccggccgaacctgtccttgtttgttttttgggggggttttgcttgtttgttttgagatggagtctcactctgttgcccaggctggcatgcagtggcgcaatcttgacttgctgaaaccttcgcctcctggattcaagcaattctcctgcttcagcttcctgagtagctgggattgcaggtgcctgccaccacacccggctatttttttttttttttttttttaagacagagtcttattctgtcgcccaggctggagtacagtggcacgatcttggctcaatgcaacctccacctcccaggttcaagcaattctcctgcctcagcctcccaagtagctgagattacagaggtgtgccaccacacccagctaatttttgtatttttaggagagatggggtttcaccatattggccaagctggtctcgaactcctgaccttgtgatccacctgcctcggcctcccaaagtactgggattacaagtgtgagccacgcgcccagcccacctggctaatttttgtatttttcatacagacggggtttcaccatgttggccggctggtctcgaactcctgacctcaaatgatctgcccgccttggtctcacaaagtgctggaattacaggtgtgagccaccatgcctggcctaccctgtccttgtggaaaagcttcctgtctgcttgttcctataaaatgtaagctcaatgatgacaggagctgcggtcactgctgtgtccccagcatcccgtctggcacaaagcacaccttttccctgtggaaagagctctccccaggaactccgaccaaactttcctatgactctagctctgacttccctgggcgagcagaatgaaagccccatccattgtacagaccagaaagctaaggtccaggaggtgcaggttctcgttgggggcctcatatcaggctccctcatgctccaccctgtactttgtacctgggaggcctgggtcaagtcactgccctcactcccagtccctgagcttgagtttcgctcttttaatgggaagcatgaccttcatgcttcatggagactttggggtatgtggcatctcttggtacccagtaaatgtttgctaagtggacagagccacattgagcagggcagaggagaggacccgcctcaggcccccacaccatggtcttgggagccagacaggctcagcagctcgcagcccacgctgccgcaggaatatttgtcaactgagcgaaaggatttggggtttggcacaattgcaccctccgtctcctctcctggtgattaaaggtgaagccattctcgcttgccagccctgccagctcagccctgactcaccacttggcagtgtccccataccctggaatgcacccccaccctgtcctcacagaggccctgcgatgatggcctaagggagaaagtgacattcagagtgaagcctgaggatgcagccaagtgaaggaagagtcagcccccagacctgtcccacctgcccttgactctctgccctgtccaacctctccattcccacagccctggctcactatcctctcctcagcctttccccagcctcccagctcccactcttgcccttctgcccccaagagaccccagagcagtcttcctacacccaacattgacttccctcccttgcttatagtcgtccgtggctccctggcacccccaggacaaagtcccagctcctcagtgcaccccctgccatctctcctcagccctccatgcactctaagtaaccctgaagccacaccagtgtccttctgttccttgagcgggccaagctctctcctgcctcaggccctgtgtgcaagctgtcccctctgccagcacgccatccccttccccttcacctagttaatgacaaccaacccttccagttcccagttaaattacacttttttttttttttttttgagatggagttttgctcttgttgcccaggctggagtgcaatggcttgatctcggctcaccgcaacctccacctcccaggtttaagcgattctcctgcctcaccctcccaagtagctgggattacaggcatgcgccaccatacccaactaattttgtacttttagtagagacagggtttctccatgttggtcaggctggtcttgaactcctgacctcaggtgatctgcctgccttggcctcccaaagtgctgggcttacaggcgtaagccactgtgcctggccttaaatgacacttctaaggggaaaacaaagccctttcctcttgtcatctgctttctctgcaagcctgagtttgcagttcttcatttgtcatagcagtgtgtggtcagtgtctgcggggagggccaggcaggctcacccgtcttgctccacattgaatcccctgtgcccagcatggcgcctgcacgcagaagatgatcagaaaacattgacttaattaagtgcagtaatagctaataataataataatagctaatggggccgggcatggtggctcatgcctgtaatcccagctgggaggcca[133 bp omitted]tgaggcaggagaatcgcttgaacccgggaggtggaggttgcaatgagccgagatcacaccattgcacttcggcttgggcgacgagcaaaactccgtctcaaaaatactaactaactaaataataataatagctaatggttagagactgctgctgcacaggcgctgtgctgcatactcgggaggattaagccatttaattccctcagcaatctcatgagttagatcctgttatcattcccactctacagatgagggaactgaagcacagagagggaaagcgacttgccccaggtcacacagctaagaaatggcagggacaatatctggactcaggcaagattggggaagtaggagtgaaaccctccagtggcgtcttctaccttagctctgataccggggagcaccacctgtcctgccgagctgggcacaagccctgggtcctgggggtgttccctggctcggcagcagagggcagcagagagcccagtcccgttccagtcctgcgctgggacctgcccgtgtgccctgctctcccagagtggccttagcatcgctaaaagttggaaactaggggcggcatgacccctctcccaaggtggccacgaggattagcgatatggcgcatgtgaaacgccaggaaagaaacctgaccaatgttcactactggagagggcacagactcagaggccgcgcaactgtgggtttgaatcccagctcctcacttctct[143 bp omitted]tgaaaccctgtctgtagtaaaaatacaaaaaaagtagctgggcgtggtggtgcactcctgtgaacccagctacttgggcggctgagacacgagaatcgtttgaacccaggaggcagaggttgcactgagcgtagattccaccactccctccagcctgggcgacagagcgagactccgtctcaaaaaaaaaaaaaaaaaaaaaaaaatgaggacgaggctagaatccaccccatgggatcgcaatgaacattaaatgggttaaactgtggtgaggcactgcagggtccacgcgagagcagcggtgccgctgtgactgctctctaacccccagctgtgtcctccctgctctggttcacaccaaccggctttgagcactctgggtttctctctccttgtctgcccctgagcaccgtgttccccaaacggaggtgggatcaggatccggcaagtgccaggccggagtctgagcccagagatgggacaaagatgggcaagagtcgggggtgggggtaatccccacagaaggtaaaactgaggctcgggggttggggacggccggcctgcctgcctacgaccgtctgatggacgtcgcctggtctgagctggttccagagctgggtggggtgtctgttgactgagaggggagagagaagagactgggaagagagaggcagggacattgaaagatggtcacaagaagttggcagtggaacatagggggacagagatgggcagaggagggggcagggccgaggatatggtacctgcgggccgggcgtcgggggcccgggcgggtggccccggggtctccagcgcaggcgagacggagaagcgggagaagcacagcggggggcctggaggggggaggagggggaaatcctccgcccactcgaaactgcctcctgcggcagaaggaaagaccgcggtcaggctgcagacacctgcggcactcccgccctctggtcccgcccctcccgaccaagcccctcccaccccatagaccccgccccgtccgccccatggctcccgccccctcccgccccatagggcccgtcctcaccaaagccgctgtcgttgctgggaaacccatctccgggggtggcggggtggggaggtgtcgggggcgctggaggcgttgacgggtccgtgtccccctcggggggggcctggacgctcagctcgttggttggcgtctcctgtgaaggcagattagggggaagccagaggggacaaaccttcacgtcccatttaccgcatcccccaaaagcaacaaaaccggctaatatttctggggctctaggaatcccaatttgtaatcactgactcgcacgctctggagaggtggctggagcccctaatctggcttcgaagccttgggccagccttaacctcaacctggccagaggctcctttcctgacagcggagccccgcgcacagctaagtagcccaacgcagggattctctcctggctcattaacgtgaggcctccaccggatcccctaacccaaagcgatctccataagccccaccccgtccacgtcagtcccacccacctctgagatcttgacctgctccagtggccctcccaacccctgccccatcctgagcgcatgccgtgctggatgctgtgaccctgcccctgagccctccctcagaagtagacctgctcccgccctccaagtcccacccctctgaaaacatttcagtggcccaggccccagttcttggccttgtttccattcctttcataatctcagcccagtatgcccgccccaggttcatctagacaaggtcccagttcctcagcaccactcgccctccctttttctcttcaacaccatatcctgtgtttttctttttgttttagacagagtctcactgtcgcccaggctggagagcagtgttgtgatcatggctcaatgcagcctcaacctcctgggctcaagcgatcctcccacctgagcctcctaagtagctgggactacagatgcgcaccaccacaccaagataatttttttctttttaagagacgaggt[146 bp omitted]ccgtcccagtcgttaggttcgctcatccctgacctcaccccagaatacgttaagactgcctgctccatctctgaagcccacctgcagcctagccatggcccttccctagtgggtaagatctgctccaacccgaaccagcctacagacactagaactctagtcaacaaaccatgcccaaactctcactaggccccttcaccatccaggcctcttctcaacacttcctccctagcctctccaggatcccatacttgactacccagtaccccctctttccttccagacccacactctctctccagacctctcctcgccctctagaccacgcccccgtcacaagccctgccctcaccctaggtcccgccccagctctaggctcggcccatactcctggccctgccccattgccaggccctgccctcacactcaaagcctcctcccatcttcctagtcccgccccatttccctgaccagtctctccccagaccccgccttcacccctcaggcccttcccgcgccctgctccatccgccccgccctaggctccgcccccattccagccttggattttctccaggcctcctcttgccgcgccacagacttggcctccctcaggcccggatccagactctgtcccgatcctaggcgcggtctccttccaggccccgcccccgctctaggctcagcctgccttcaaaccctgctgtagaccccgccccaccctaagctcagccttcgtctaggccccgccccaggccctgcacctctaggctcgacctccctccaggccccgccctgggctccgccccccagcccgccctctccctgggccccgccccactctagctcggccccgccccaggccccgccccactctagattggggctccccttaggtcccaccccaattcagcttgccctccctccaggccccgcatcactccagctcggcctcccttcaggccacgccccactctaactcggcctccctccaggccccgccccaccctagctcggcctcccttcaggccccgccccactccagctccgcctccctccaggccccgcccaactctaagctcggcctcccgccaggcccttcccggctctaggctcctgctccctccaggccgcgaccccgaaaccgcgccctctcgggttccgcacctggtcgaagaggtagacggtcacgtccccgtggaaggagaccatcttgcgcttcctctccagctcgctgtcctctggctcgtcggccccgcgcggagacttgagcagcccccgcagcgggcgggccgcgtccgcgtcggcgctgctcaccacgacgggcaccggggctgctcgcgccctcccggggccccgcggccccgccgccgcgcccggcgccgccgcctcctcgtcctcctcctcgtcctcgtcctcgtcctccccgtcctcctccgccggccccggcgctcccgccccgccggcctccccgccagccgccccggcgtccgcgccctcccacgggggccgccgcgggcccggccccgggaatggcgtgagcgtgagcggcggcagcgccagcgagagccgggagagcctggctgcgaggggagagacctggtgagcccctgtcccggtgaaactgaggcaggccctcccacctagctgtgtggcctcagataagacccccgcacaatctgggcctcagcacccactttgtgaacggaagggctgcaccagggcttctccaggcagggtgggaaaggtcctctccagtgctcaacctccccagagctccccagtgccaacggctttaagccgcaacttcccacagcccaccaggccctcatgccctggcctacctgatttctctggcctctgtccccacctcctctggcctgacctccatctagccacatgggccaccccaccattcct[135 bp omitted]gcctcccaaagtgctgggattacaggcatgagccaccacacccggccagatccacctctctgagcctctgtttcctcactggcaaatgaacaagggtcacttagccctccattactgcataagtgaactgccctttctgagctgatggcaggggcaagaggagggtggaggtggggcagggagaaagatgaatgcagacggtccctctcaggtcctcgttctctctactcaagttttactaccttttgctattctctaaacatggtgagccagtgcacatctcagtgccctctctagaacactctcccaccgatgtccacctgcctcactccctcctttccttcacatctgctcaaaagtcacacttttgttgaccagacatctcagggtgatggggttatgggcgatgcttcatagagggagtgttttttttgtttttttttttgaaatgaagtcttgctctcgtcgcccaggctggagtgcagtggtacgatctcggcgcattgcaacctccgcctcctgagttcaagcgattctcctgcctcagcctcccgagtagctgggattacaggtgcctgcccccacgctcagctaatttttgtatttttagtagagacagggtttca[131 bp omitted]cccagatgaaggtcaggttgacaacctttaaaaattagggaaggcttcctggaaaggggaaatttggggtcttgaaggatgagtagttcacttgggaaaaagcgggccattctctgcctcttttcaccccccaatcctaatccaacccagatcctctgacgcatcttagctgctcatctcccaacattttcatgcagcctgggctgtttcctgatacagctgttcacaaactccctacaacaatctcaaggaagtgacagtgttcgaacaccacaggctatgaggaagaaacgtcctctgtccagcccacttcctgacccttgcccactgagccacaggctcctctatggagatgataactgtttcctcaagtgtggctgtgaggttgccaatataaaacaggacccagccacttataactttcatacccgtatttaaagaagttgcgcctcccagagattctgctggaactgtatttcctatgtccacatctaaacaagggctatttatttttacccttcatttatcttaaagagttttctctgtggcaaaatacttcctgcattcctaccaaaacttaattttcagaaaggcatatctgtgccttccagctcactagtcctatggtggtggagttgtcagggcaagatctgaagctccctgggtcccagccttgggcagctcagggcctcgaacacaggaggcctggcacactggatagatgccttagcttactggaaagttgttgtttgtttgtttctgtttgttttgttttgttttgttttgtttgagacagagtcttgctctgtcacccaggctggagtgcagtgacgtgatctcggctcactgcaatctctgactcacaggatcaagtgattcttgtgcctcagcctcccaagtagctaggactacaggtgcatgccaccacgctggctaattttttctttttttctttttcttttctttttttttttttctgagacagagtctcgctttatcgcccaggctggagtgcagtggcacaatctcggctcggtgcaaactccgcctcctggcttcaaacgattctcctgcctcagccttccgagtagctgggattataggcgcctaccataaagcctggctaatttttgtatttttaatagagacagggttttg[132 bp omitted]agtagagatggggtttcgccatgttggccaggctggtctcaaactcctgacctcaagtgatcctcctgcctcagcctcccaaagtgctgggatcacaggcatgagccacagagcccagccagcttattaagtttaaatcagcacacgctggcagcctggggcccttgagccatccacagacaggcttcctttgaactggctgcaaccataaaaacaaaagaaataaaaaccagagctctagtttaaaagggaaaagtagcagattcgccaacaccaggtgcacattcctgagaagtggctgccccttctacacagggcattttcttctgaagccccactctgcctccctagcatgcttcatccgtttccctatgtcgtctggcccctgtgggcatgagtttgagacccctggtctaagtgagttgcaataataaaagcaggtgcttactgaatcccttgctctgattaagtgccttggatgtcctaattcatttaaccttcacagcaaccctatgacgtaggttctatccctgccatccgtttttggcagatgggtaaactgaggcaccgtgcagcaaggacatttgcccaaggccaaagagctagagagggggctgagccacgatgtgagcccaggtggtgcaggcttcaggacctgcattcatcactgccagcccgacccgacatgtttacccacactcaccctccgcacgcctcggaaacagccggacctcagccctgactgtgccccgcagcctcctcacctttgatctgctcgctgttcccctgagggggtcccaagtccaagaatagtcgtggcatctcggggcccttcctctcgggcttgggggggtccccgtctccgctgagtgccgtgtctccgccggccctgctgtctggggccccgggctctccctcgggggccacctccggcctggctctcgggggcgctggctccagcctcctcggctgtgcctccggtggcggtggcagcggtggcggcggtggctgcggcctcgtgttgtctacccatccggcctttgcgtccacgccgcttccggggccgccgccgggggccgtccccgtgcccactggggctcggcccccactcccgaggtccagcctcccagcccctggggctctcggcgcccccccagtctcgggggctctcctctcggtcccgggttccagcgtcccgttcttgggggctgggccaagggggccaggggctgtctccccgccgttccgggaggagaccactgcgctgggtgcaggggctctctccagagaggtctctggggctggctccccgatcgtgggggctggaccccaactctcgggcgtcttctcccagggccctggggctctccaaggcccagtctctggtggcctctccgtgttcctggggaatctcaggcccccattctctgacaccttgtcctcgctctttgggggtgtcaggcccccattcaccagcaccttctccccggcctctggggacctcagctccccattctccagcgctttctcctccctccttgggggtgtcagctccccattctccagcactttctcttctctctcgggggaccccagggccccattctccgccgccttctcctcgatgcctggggctctctggtccccgttctccagcactgtcaccccgttcactgggaggctcaggcttggggcttgtttcccgttgcccaggactgtcgggtccctgttcaggcccgggactttctctctgttcccggggcctctccccgccttcctgggtcctgtctcccgggctgtcgcccccttctcccccaggaggttccttgtcacatcctcccgcagggacatcagcagctgttccgtgctcacttgaaccacgaaggtcggcttctcccggggccccgggagtgggagcggacccgggtctggaggtggccggggcgctcctgggtcgggtggctcggggggagcccgcggccgagggaccccttcctcctcggccgcccccccacctgggaaggctccctctggggaaaaaggggtctcggtctcgtagccgctgtcccccggcttggggcccggcgacgagaggcctgaaccgggactggccacggccgaaggggggtcgggggacgcggccgggtccgcgggggcccgaggaggtggcggcgggggggggggagcgggaggtggcccccgcccggggtactggggcgccgccgcccccatgagggggtccagaaactcggggggggccgaggcggggggggccatgggcaagtcggccagggagccccgctctgcccgcagcgaggagtcgtcctcgggggggtgggggcagccaagagcagggtggcctccccagcctgctacggcgtccccccgctccagtggcaggcaggagcaggccccctcgcggctgcacaggggacagggtaggggaccccggcggcttgggccacctccaaggctgctgctgtcttcccctggggagctgccctcctcctcctcctcttcttcttccacccacggggcggtcccccgctcccccaagacctcggcagggtctcccgccagggtctccccggcgccccggccctcggggtcccagccgctcagcaggaagctgcctgacgctgaggactgggctgggaagggccggggcgcagggaagaggggggaggcccaggtctcggacaccagctgggggacctcggagggggcctggggggcctgaggggcgggcactcctgggtccagggggtcccagtcgttggggaagaggggctcaggaggggagccgtgctcctccaagcggatgtagtactcgctgctcacggaggggctgcgggcgctgatgacaggcagcacgctgggcgtggacagcgcctcgtagaaagggttggaggggttggcgtggggggccgggggggccgacgccggctgccaggcaggtgcccccccaccccggccggccccacgccgggccttctcccacaggcactcgaggttgaggccgcggctactctcggtgaccgtgagcacatcgtcggggtcggctccagggaagccatccagtagggggaacggtgaggagagggtccccgggcggggcgcactgtgtgcagggggccagggccaggggaagggaccgtctcggggtgggggtggcggcggtgggggccggggaggccgctcggagagcaagtaggtgagctgcaattggagatcagaggctgaagggcgctgggcaggtggccgccagcaggactgaagaatgtcatacctggggagaggtggggcagagtgagcagggcagagacccagggaggggaaagagacccagggaggggacagacaaccagagagagggggacagagacccagagggtaacagagacccagagagagggggacagagacccagagagagggggacagagacccagagacagagggacagagatcc[137 bp omitted]catggtgaaaccccgtttctactaaaaatacaaaaaattagcctagcgtggtggcacctgcctgtaatcccagctacctgggaggctgaggcaggagaaccgcttgaacccgggaggcggaggttgcagtgagccaagatcgtgccatcgcactccagcctgggcaacaaaagcaaaaatctgccaaaaaaaaagaaagagagagagggacagagacccagagagagagggacagagacccagagagagggggacagagacctagagagagagggaaacatagacccaaaaagtggggcagagatccagggagaagaggggacagcagacggtagagattcagaggaggtaactgggctggggagctgggtattgagacccaaagaagcaggggtggggggaagatgcccatagagagaggctgacgggacctggaggcagaggggacacagcagcagatgggaacggctggtgagggtagtggtgtccctgtttgcgctgtgagctctggaatcagacaggtaagaagcagggacctcttagggtgaagtgggttcaaatcacagctctgccatcccctgcctgtgtccccctgcaagtagcagatgctggcagaaagggtggggacagcccctcttcactcttgaggggtatggagggcaaacgggatgtgggtgatgtgggaaacgaggggggatgctgggaccatcctgggtggggtgcggcaggccaggagccccgggtgggctagccctcaccagtagtccgcgtaaggcagcttgagcctcggccgggccagcttcacatgctgctggcggaccacgaaggcgaggacctcctcgtctgacaggtggcggtagggctgggccccaaactcaaacagctcccacagggtcacccccagggacctgcagagagcagagagaggtcagagcccagccctgacccacccgggcctcattttccccatctgtagaaccggtggcatctagtaacccttccaccttcctggcctgcctcggcccccgcggcccgtggtcctcaccagatgttgctctcgcggctctggtccaccaccatgaaggtcccgtggagctccccgaggagctcgggcgccgcccagcgcagtgggatccacaggcgctctggggtcaggtagtagtcctcctgagggaaccagggcggtgtcaggcgggtcagggcaccccacagcccccatcccgacggaaggaagccctaccttgtagttgctgtgggccagcccgtagtctccgatgcgcacggtcaggtcagaggtcagcaggcagttgcgcagggccaggtcgctgcgggaagaacgcgaggaggtgagcgcaggggcagccctccagccacgccctgaccccgccctttcacactgactccacccctcccatgaccctgccccgccacactgactctgccccttccctctgatctgtctctcccctctgactgctttcactctcccctgctgtcttgtcttctccccacccctggttcctccaagtctcctctccttttcctctgcactggctcctcctcttattcatctgacccttctggcttctcctgcttctctgttgactcctccccctcctctcccagccacctctcctcatcacgtgaccctgcttccccctcacctggctccttccgttcctctcctggaccctcctcctctcctgactcctccccctcccctgcccccctcccctggctcctcttccctctcctggctcctccttctctcctggaccctcccctatcctggctcctcctccttctctcctggcccctcccctcccctggctcctcctccccctctcctggctcctcctccccctctcctggctcctccccttatcctggttcttcctcctcctcccctgacccctccccctcccctggttcctcctcctcctctcctgaccccttttcctctcctggcccttcccctcatcacctgaccccgcctccctctcacttggttcctctcattcccctcctggtcccgcctcctctcctggccccttctcctccataccctcctcggttcgtccctattttgtgtcagccagtcatgggtccgccccccctctagcccctcccctgaggcctcacctccttcccccttccccttagtagctcctcccgcggctccccggcccgcccacctgtgcacgtagttgtgggaatgcaggtgcgccagcccgcgggcgatctccaggcccatcctctgcagcgtccgcaggtctcgagggggtagctcaggggacaggccctcggggggccgctgggctcggaggtaacgcttcaggtccccctgggagggaggcaaagaaggtcagcaccaccagccgctcaggtctccagctagtcggcccggaggctggaatggcttctgctgtcactgggtagcccctctgagccttagtttcctctgctgcttgcagcaggtaataacacagcccatcttgcctgcttgttcaggccagcccccaggacaggcagcactcatgaaatgttagcgcatgccacacatcatctacgatgatgatgatgatgacgacgaagcccaggggcaccaggcttggccccggccttgtccagctgccccctctgcccttccccaaccccccaagaccctcaccagttgacagaactccataatcagcagaaacggcagcgtctccacgcacagacccaggcactggaggacattggggtgctgcaggctcctgtggagtgaggaggtggctgagttgggaaggcagccccttcctcttcatcctgccccaacccccagcagaaccaaactgctgcctccacccttttttgttgtttttgtttgtttgtttgttttgagacggagtctcgctctgtcgcccaggcgggagtcctgcctcagcctcctgagtagccaggattacaggcatgcgccaccacgcctggctaatttttgtatttttagtaaagatggggtttcaccatgttggccaggctggtctcgaactcctgacctcaagtgatccaccctcctcaggctcccaaagtgctgggattacaggcgtgaaccaccgcacccggcccactctacctttttgatctcagtttcctcacctcggagtctctctcctcgaccacaccccactccttccccaggtccccatctctggatggccctcactggcctgctcctgggggagcaggtccccagggacccctttacctctccttcctccttacacctcacctccaccttcattcctgccccagactcttctcagtcttctcctcctcgtccccacagcctcctcccagcctccctggctctagtctctccccttccctttgcctcacctgcttttcaccacacacagccctctgtcgatccccagcaccccaggatagagcgccggctctttgattcctcctgctcctccggctggcccaagagtcagctttatcccatgtgggttttcccaaacctgcaggcccttgcttaggcccgggcctttgcacctacagttttctctctctctctctctctcttttttttccttccttgcttcctccctcccttccttccttccttcctccctccctccctcccttccttcctctttgagagggagtttcattcttatcactcaggctggagtgcaatggagtgatctcagctcactgcaacctccacctcccgggttcaagcgattctcctgcctcagcctcccgagtagctgggattacagatgcccgacaccaagcctggctaatttttgtatttttagtagagacagggtttcaccatg[131 bp omitted]ctctcatcagagttctcttggcccctccgggcctctgcctcaacatcatctccccgggaagctttgctgcccccccaatgccaggttggataccctcccctttaccctcacgctgtgggaaagagtcagactcgggggtttgaaccctgactcccactttcctaggtgtgtcatctcaggcaagccacttcgctgctccctgcctcagttttcctcatctgtaaaaatgggacagcgataacaacttcctctgaggaattacatgagatctgagagaagctggtatgtgctgagatcctagcaattactgctgttttaatggcaacatattatttgattttattttcaccctgcattcttttttttaagacagagtcttgctctttcgcccagtctggagtacagtggtgcaatctcggctcactgcaacctccacctcccgggttcaagtgattctcctgcctcaactccgagtagttgggattataggtacacactaccacactcggctaatttttgtatttttagtagataatgggtttcaccatgttggccaggctgctcttgaactcctgacctcaagtgatccacccacttcggcctcccgaagtgctgggattacaggcatgagccaccgtgcccaggcttcaccctgcattctaaatgtatttccagggctgctcactctccatgagcttcttcctgtcctacatcctttgtacctgctgttccttctgcctggaatgtacttcccatggtgctttgcatggctgacttctccaagtcaacccggcctccctgatggtcctatccaaggtggcccctgtctctgtcacatactgcctcattttctcatggtatttgtcattctctgacagtttctctctctctctctctctctcttttttttttttttttttttttttttatgagacagagtcttgctctgtcgcccaggctggagtgcagtggtgcaatcttggctcactgcaacctccatctcccgggctccagcaattctcctgcctcatcctcctgagtagctgggattacaggcatgtgccaccatgcctggctaatttttatatttttattagagacgggatttcaccatgttggccaggctggccttgaactcctgacctcaggtaatccgcctgcctgggcctctcaaagtactgagattacaggtgtgagccaccacgcccagctgacagtttctctttttaaaatgcatttctggcttggtctggtggctctcacctgaaatctcagcactctgggaggccgaggcaggaggatggcttgaacctagaagtttgagaccagctggagcagcatagtgaaactccatctctacaattaaaaaaaatatatagtctgggtgcagtggctcatgcctgtaatccctgcactttgggaggccgagatgggtggatcacctgatgtcaggagttcgagaccagcctggccaacatagtgaaaccctgtctttactaaaaatacaaaataagctgggcttggtggcacatgcctgtaatcccagctacttgggaggctgaggcaggagaattgcttgcacccgggaggcggagattgcagtgagctgaggccccgccattgcactccagcctgggcaacaagattgaaactctgtctaaaaaaaaaaaaaaaaaagtctgtaatccgaatactttgggaggccaaggtgggtgaatcacctgaggtcaggagttcgagaccagcctggccaacatggtgaaaccccgtctctactaaaaataccaaaaattagccagatgtggtggtgggcgcctgtaatcgcagctactctggaggctgaggcaggagaatcgcttgaacccaggaggcagaggttgcagagagttgagattgcgccactgcactccagcctgacaacagagcaagacttcatctgaaaaaaaaaaaaagataaataaataaaaataaaagttagccaggcatggtggctatgcaggaggctgaggcaggaggatcacttgagcccaggagctcaaggctgaagtgagccttgaaaaaaaaaaaaaaagtatttatttatctattgtgtgtcttctccactagggggtgagctctcctaggataagaatttggtgtgtcttcctgcctgtgtcctcagtgcctagactagtagtagatgctcaataaacacaggtggagagaaggactggcttggaggtctgcaggaggatgagaacatttcaggcttgcagcccagggtctggccaggagtaggtgcacagtaacttactagttattttcctactggggcctggcgggaggcagagccacttgtgtgctgtggggccactgccagtacccagccttctattgcctgtgtgtaaccgcggctctgctgtttatgctgtgtgtcctcaggagaacagggtctcttgcttctgtttggtggaagaatcgtgtaacaaagtgttgttattgttgttgttttctcacgctgtctcccaggctggagtacagtggtgtgatcttggctcactgcaacctctgcctctggggttcaaacaattctcctgcctcagcctcctgagtagctgggattacaggcgcctgcccaccacacctggctaatgtttgcatttttagtagagatggggtttcaccatgttggccaggctggtctcgaactcctgacctcatgatctgcccacctcagtctcccaaagtgctgggattactggtgtgagccaccgtgcctggccaatttttttgtatttttgtagagatagggtttagcccaggctggtctccaagtcctgagctcaggcagtctgcccgccttggcctcccaaagtgctaggattacaggcaggagcccgacaaagtgttcatgaagctcctgccatgtgtggggcttcaacagtggctggagttcccagcatgggagacttggggtggctggtgtagaaggaagccaggattcactgcacacccacgaatctggccaaggccggccgctctgctctcaaatcctcccagcaacgtgctaggcaggatgatgatccccatttgatccagatggaacagaggtgaagcgacttgcctagggtcacacagctggtaatgatgggaacattgggatttgatctcaggtctgtggctcgcccagcaaacgtctactgagagccagcagcacttgtgctcgggtaacgagacagaccctgagctgctgctagtagagacctgcactgtccaacagagctttgcgaaggtgggaatcttctggaccagccctgcctaccaggggagccactggccacaggtggctattgagcacttgagatatgatgagggtggctgaggaaatgtgtttttaatttgattgcattttaattagcttacattttatttatttatttatataatagagacagggtctcgctctgttgcccaggtgggagtgcagtggtgcagtcatagctcactccatcctccaatttctggcctcaagtgatcctcccaccttggcctcccaaagtgccgggactacacgagtataccaccgtgcccatcttagcttaaatgtaataggcatatgtggccagtgtttgctggcacaggtttagggagagacaggcaataagcaagtaagcaaatgatatagtgacaacctggggtatgggttatgaagaaaacacatgccatgacggggtgaagcaccccaggaccctctttggaaggaggggaggagtaagggaagatgtctctgagctgaggcctgaggaagggaaggggccccatccacacctggggatgagcaaggagtgatattctagagaggatatagcaaggtccgatgcgctgcggcagggaattggcttccgtggggagggtcagtgaagaggccagcgtggctggggtgagggggacattggaaggaagggacagtgtcagactgcgcagggcctgtgggctgtcaggaggaccagatgtgtcctgtaggcagtagggagccatgggaggttttggagtgagggagtgccaaaacccaatgtgtttctcagggtaaagcccacctttacaactgttctgataaggggtctctgcgaacacaccctttccaaaacagggaactcactacctcacaaggaatttatctggcaaatggatacctagaccccatcctagaagcactgagagtggagtagagaccaagaagggcagggatggagctccacagtggcctgctcgggcacctgctcagggacctagtctgtggcctggggaagggaagtaccagctggtacccaacattggacatgggaatctcacatcctctcagctgccctcttcatgaggacactagggcttcctggactcactttccagatgaagatccggaggttcagaggggagaggagcaggcctctagctcagcttctgtgctcccgcctcctccaccatcctgcctctcacttcccacccttagctcggtccagaggaagaacctgaggttcagggagggaagttctcctgccagagctgcacaaccggaagaggtagattccaggtgtgaccccatacagcactccttccactcctgaatgtcacctcaacaaggcacacacccactgagaaaccctcagtacctgtacggctgtgcttccgagatgaacttgcgttgctccaggggccccgcgctggctcggagctccttcaccaccacctgggcgggggtgtagtcggagaaaatctctcccaggatcacctggtcaaggggcacccaggagtcagcgagtgccgtttccccagccccgtcccctgggaccagctccactccaccacacagctcccaacccccggctccttcccagcttctccctccacatcccaccacccttgacccccaccagacatggggtgagacactcacgggcccagaatccgatggacgcagggacggatggaaggatggacagacggacggacgcgtggagagccgggtggcgcggcggagtggtcaatggagtgaggagggaggcgctgactgacagatgtcggggatggggcgggtgggagccggtgagaggtggacggaggggggatgggaggctgagggggcatggggaggaggcgagggacagatgagaagtggtgagagcaggggtgtggacacagaacaggaggacagctcgggatccatggagccctgcctcccctccccagcccactcaccttcccaaaccagccactcccaatctcctgcaggtagctcaggtgctgccggctaaggcccaggggggtggtcatgtctggggagggcaagaggggaaagcccctgagtctctcccccttcctgagtgctaccaacacaccccaggtcagtggggactgagacagagcagacatcactctcttttcattggctgccacccacattccatgtcagaatctcagcttcctcattggctgctcacaaggctccagcatccaatcagtccttccttttggcatcccaagctcctatgatgtgatttcagcctcccattggctgcctctgagactgtgctctatggtaatctcaccaccgcttgccccttaaaaatccccaaatctggttttggattaagcaatggcttccaccaagatgatctttgtctgcctccccataggctgcttccaagattccagcgctcccacctatgcctttcccattggctgccgctggtctcaaccgccccagcccctgaaggaacacactcaacatcttctggcctttcccgggacaccatgggatgctggtcatggcgtggggcagtacctgagtgtgaaggctgcggggcaggcattggcagggagacctcagccagcgggagaatgtagacatcaggcagcgactgtgaggaggaggtctcctccgcagggggagtgtactccccggagcagtcctccccttcagggttctcaaattcctggggccaggagaggagaagaggggtgggagaacgcagggctgagagacacgccatcgtctttctcttaagtttgtctccccttcatttttgtaactgtctcccagtcccagcccaatttccatcccccatttccccatcccaaggctccagatcttgccatagcttcaagctggaaggtgctctcggatttactgcccccttctccccaccaaccacctgtgtagggggtaaaggccttgctggagtcttcctccccaagttgaatcccctcatgcacctcaccttgaagccgacatcgccccgtttgcagcacagacaggtgaggaggaggaagatgaaggccagcaggccggagcaggaaatgaggaccacagcgtagggaggagccagaggagcccggcccagggcgaatccatctgtgggcacagggctgggctggggtcccagcttcaagtccctggataccggaatcatgccccctcccgtcccggcacgtcttggactacaactcccgtgatgctctgcgaccagggtcccttggcagaggtgcagagtggcccaaggcattgtgggagttgtagtttggggccttcccaagtggttggattgggggtggggtctctcttctcgtcccaaactgggacccccgccacctcatcccaccccatcccctcaccccaggcttggatgaattccaatgagggttgaaggaaagaggagtgatagtgaagtctggagcttgcagaatttaaaatacgctcccgtggacagcctcattacccctcgttggggaggaggactagctctcagctgcaggctgggagaagattcttgccccatgctggaaccccccagtttgtggggttgagatctgtctcttttagggacgcttggcgcacaccgatgttctctatccccagcccaagacccagagaagggaactccgcaagccctgggtctctccagaagccagagacagcctcccgtgttgtgtcccccttagaaatagtattcctgtcctctgcccccaattctcccagaggccctgtccttccccttcttcctgcacacaccagcacaaacacatgcgtgcacgcatacacacatgttgcccaaacggagccccctccccacccagcccccagcctccctcccacaggccctgctgacagaggcaccgtccccgccgctccgggccctgctgggctgcgggaagacgcgcaccaggtgacggggcaggacccgcagacagacccctgggcagacagcgaggccgccgcgggggtgggggccaccggacagactgatggcccgacagactcaccggggtgggccggggacgccaggcagccggaggcggagacggccgcaaggaggatgagggcgccgggggcaggcatcttgtcgaggatggcagggaggtggaggtggtggcggctggggaggaggggggggcgggccctcagcccccagccatggggacccgcgcgaccctggcctcctcccggcccaggagaggggcaggagacgcaggacagggggagggaggggctgcttgctggctcaggtacccccctccccctctttgaagggacagacggatgaagggatggagaggcggacagaggagagatgctggggagccggggttgctggggtgggggggagagggtaggatggggggggcgagaaagagggccccgcccccgagggcagccaggattgggggagcagagagcctgtcacaggaagggtgggaggagggaggatggagcgtcgtcatggcaactggctcccccgtagcattggctgccaggagggaggggaggaaatgggagggggagggacagacagggaccggcacacacttgcagcgggggtgggggggcagggcccacgggtgcctggcccggacaccgctgtgacatgccaccagcatggacacatgtgctacacgctaagatgcagatgtcaggcacgcgcagcccacacacagctgacacacgtcgcagggaccctcatagacaagcgcatcacatacaaaggtggacagccatcagcagacggggacacgtacacgtcacacacaaagacgcagggaccgcactggaaacgcacaggcaggccagcttccagcacagatgcacccggccacgcaggaacgtcaaagcatcacaaagacccacacatgccccggacaaagtaaagccccagatccacagacgcacacgccacagacaaagatccccacggacaccactgtgacatgctgacactcatagtcacagccacgcagacagtccctagacaaatgggcaacaaagaatacccacagacacaagtatcacatacatgcacgtcacacagacatgcacagacagcaattgcacagacacacgcagacacacacatcacatgaactaacatagacacggacacagcagctacacagagacaggcacatcacatacatgagtacacagaaacataatacatgcatgtatacggacacgtaacatgcatcactcacacggacacaagcttcactcacatggatacacacagacacactacatacacatgcatgcgggcacacacaactcatacatacagggctacataaatcacatgcaaaaatacacataaatacaccacacactgatacatacagacacatataacatgcacatatacacagtcacacatacataagcacagacataggcacacagatcaaatacacagacacacagagttgcacacatcacatacctaaacagacatggacacacacatcacaaatacacacacctttcacacaaggttacaaagacacagaaccccaccacagtcacacatcacatacataaacacacactggcacacataacacatacaaagagtcacacacccacaacacagacacagacacgcgcacagacacacgggtcgcaaatacccacgtttcccgtgcggttacgcagacattacacaaccacagcacttgcctcatacaaaagatacatgatcatagtttatttaatgtatttattcttatgagtatttagtctgtgccaggtatcgtccgcagcgttttacacgtacagaattacctctcaatcctcacaaccgccctctgagacaggtattttttaatcatgcccattgtacagatgaggcaactgaggcacagcgcggggtagtcacctgccccaaggcacacaagccggggagtggcaaagctgggactggaacccggtccatcggggacaccgacacatcagacaaggacacacatacatcacgtgccaggccgccgccgtctcggggtcacatcccaccctccagcgccccgagctgcagacacacccggaagcgcggactcccaccctgggcgcggacctctccatcgtccgtgagcacctgcgaggcgttcccctgggtgaggctgggccggagctgcgcacccaagacgcagcctcagcaacactcggcgcaggcgacccagcccccaaccccaacccccagcaggggcccagggctttccaccaaaacgcgcagccgtggcgcacaccggccgggcagtgcacactccccgcagagcgcagccgtcctcatcggggggctcaggggaaggggctgccctcagggtgtctcattggagaaactgaggcaggttcatcgcgggagggagggggcgcacggcctaggctgcagggtggaggggatgcaatcggggggcggggagtgagaaaagacgcaattcgctgcccgggtggctgaagggcacagaacctggcggaagcagaggcttatgggaggtgtagtcctggccttgagacttgtaggaaatgtagtcctgctcgacccagcaaggaggctcagattaagctgcggttggatgcgggtagcaggagccgaggaagggtccgctgcctgggtctttggaagtgatgtgggcagaattatcaagtcctagggagcggcacaggcggggctgcagtcctgactctggccccagctcgcttgttcatgtattcactcaacgaacgtttactaggtgcccactatgtgattaggcaggcgctgggccagaagctggggctgcagcaggaagcaagtgagacgcgttccctcaccttctgggagtctcgggggttcaaggaaagcagccacgagtggaataattgcacatcaggacttagcactgccgggcaccactgagtcagggtggggatggagtgggtcttgtctggggagtaacagagggttccctagagctttccaaactgtgagcgcccagccattagcaggggtgatatcaagatcctcggtggtctcagaaacaaagtcactctctgaaaagaaagaaagacaaaaaatcctccgtggcaatcagcactttttttttttttaatgggggccgggcgtggtggctcatgcctacaatcccagcactttgggaggccgaggagggtggatcatgagatcaggagatcgaaaccatcctggccaacatggtgaaactcggtctctattaaaaatacaaaaattagctgggcatggtggtgcgtgcctgtagtcccagctactcaggaggctgaggcaggagaatcgcttgaacccaggaggcagagattgcagtgagccgagatcgccgcgccactgcactccagcctggtaacagagcgagagtctgcctcaaaaaaaaaaaaaaaaaaaaaaaaaaaaaaaaaaaaaaagagtatcagtctgtttaggtcagttttatcaccaaacttgccctaaaactttttcctttttgacactttattgatttcaaaactgaaactacatgtcagtggttctcaaagtatggttcagagtcgcttaggagtccctgagaccctttcaaggggtccatgaggtcaaaagtatttgtatactaccctcctgagatgttaactgcctttttcgttctcattcactcataagtggacagtagaagtttccagaagttgcctgacatgtaatgaatggctgcactgaagacagacacagatgcaaggatccagccagacattaaagagatgtgcggccgggcgcggtggctcacacctgtaatcccagcactttgggaggccaaagccagcggatcacttgaggtcaggagtttgagaccagcctggccacagagtgacagagtggaactctgtcaaaaaaaaaaaaaaaaaagattttcaaaatgacacaaacaatgccactcaatgcactgaatttttttggaaaatagttttttttttttttgagatcgagtttcactctcgttgcccaggctggaatgcaatgggggcgatcttggctcactgcaacctccagctcccgggttcaagtgattttcctgttt[134 bp omitted]tggccttccaaagtgctgagattacaggtatgaggagccactgccactggcttttttttttttttttgagatggagtcttgctctgttgcccaggctggagtgcagtggtgcaatctcagctcactgcaacctcctcccaggttcaagtgattctcctgcctcaacctcccgagtagctgggactacaggcgctcgccaccatgcctgactaattttttgtattttagtagagacggggtttcaccgtattgcccaggctggtcttgaactcctgagctcaagtgatccacccgccttggtctcccatagtgctgggattacaggagtgagccaccacgccctgccaaatagttattatttttataaaaataggtttatacgttaacttgcaatggaaacccagtgctttgggaggccaaggtgggaggatcccttgaggtcaggagttcaagaccagcctgaccaacatggcaaaaccttgtctctataaaaaatacaaaaattagctaggcatggcggcgcacgcctgtagtcccagctactcaggaagctgaggcacaagaatcgtctgaacccaggaggtagaggttgcagtgagctgagatggtgccactgcactccagccggggttacagagcaggactctgtttcaaaaacagcaacaacaacaacaaattggctgaatgaaggaaagaacgaggttatttcctgcaggtgcatttgatgactgattcaagccaggaccactcccctgttgcttgggtgttgtccactcagcacaagtttccagccgatgggttatgactgtccattccagggaagaggaagagcaagctgtcatgaggacgcagaagggtgcactgcactgaaccagggttccttgcagagaagcctccagagaggatgacgtttaggcccggctgtggctgggagcagggttgagtctgaggctgggggtggggagctgagcagggagggcattccaggcaggggccacagagggcacaaaggcctggagctgtggaactgcttgggacctttgggaaacctgcacctgccccgcccaccacctccccagcgtggtggctccgacccaaaccttccagtcactgctgactggctgtctttttcccacacctccacgtccagtccattagctgactctattttcaaaatattcccagaatctggccacctctcaccacctctacttccaccctcgttgtttgcttggactattgcagtagcctccttgatgatctccacactcggcccctcaccccatggtctcttcttgctacagcagccgaggaagcctcttaactccgaagttagcccatgtccctcttgtgctctcaactctcccacggctcccatctcatttggagtaaaggccagcatcctccccacggcccacgcaactccaaattatctggccccccgagtctgtttgccctgttcgctggtacactttgccttgttcattcccttccagccatgctggcctcctccctgttcctccaacactgcatgggcaagaaacagctttggggcctttgtactcggcgccccgcgttctctggggactccccgttccccaggtctgcacctggctgacgtctttctttcagttaggcttctgcccacgtgtggcctccccagagatgctttccttggccaccaatggagcagccctgacccttacccccttcttgtcccttaacccatttcatttttctttcttttttttttttttttgaaatggagttttgctcttatcgccccggctggagtgcaatgatgcgatctcagctcactgcaacctctggctccccgggttcaagagattctcctgcctcagcctcccaagtagcagggattacaggcacccgccaccatacctggctaatttttgtattttcagtagatactgggtt[186 bp omitted]acctctgcctcccggattcaagcgattctcctgcctcagcctcctgagtagctgggattacaggtgcgtgccaccacgccccgctaatttttctatttttagtagagatagtatttcaccatgttggccaggctggtctcgaactcctgacctcaggtgatcctccagactctggcactcaaagtgctggaattactgcagctggtccctgtttcatttttcttcattgcaatcagctccacctgacttggggccgcatattcgtgcatagagccctggagaacaaggatctttgcttttgtttcctgctgtgtccccagtgccgggtacacagaagaagctcagtgactgtgactgcaggaatgaagctgggatgatagggagagacagccccagcagtgggcagaggttgccagaggctctgtctgcagagccaaggagttgagtctccacttggaaagcgagtgtgtgcgcagcagggtaaccagggtgaccaggctgcaggatggcggggacacagcctcctcctcttttatgaaattgaagcaccattagggtatgagaggctgggggaggaatattccatgagcccaggatgctgcctcagacttcattcactaactcattcattcattcattcattcattcatccattcagcaaacaaacaagcctccattccagcagcctggttgggtggacaaaaagaaagaagctgaagggacagcaatatcaataatgatattttatttcacctttttttttttacttttaaaattttttcttttcccacacctgccaaaacagcatttatttcactctttgttttttttttagacagtgtctctctgtcgcccaggctgcagtgcagtggtgcaatctcggctcactgcagccaccaccttctgggctcaagcgattctcgtgccttagcctcctgagtagctgggattacagacacgcaccaccacgcctggctaatttttgtatttttaggagaggtgggctttcgccatgttggtcagcctggcctcaaactcctgacctcaagtgatccgcctgcctcggcctcccaaagtgctgggattataggtatgggccaccacagcctggcctatttcactattaatggaggtataatttacaacaataacaagcagagattttttttttttttttttgaggcagagtctggttctgtcgcccaagctggagtgcagtggcgcgatctcagctcactgcaagctccgcctcccgggttcacgccattctcctgcctcaggctcctgagtagctgggactacaggcacctgccaccatgcccggctaattttttgtattt[152 bp omitted]atcacgatggcgcagtcttgggtcactgcaacctctgcctcccgggttcaagtgattctcctgcctcagtctcccaagtagctgggattataagcatgcaccaccacacctagctaatttttttgtgtttttagtagagatggggtttcaccccattggtcagactggtctcgaactcctgacctcaagtgatccaccctcttcagcctcccaaagtgctaggattacaggtgtgagccactgcgcccggccaacaagcagagatcttaagggtacaatttgaggccaggcatgatgactcatgcctgtgatcacaacactttggactttgcactttggtgcaaagttggagagtttgagaccagcctgggcaacatagtaagaccctggttctacaaaaataaaaattaaaaaataatctgggcatggtggcgcacacctgtagtcctagctactcaggaagctgaggcaggaggatcacttgaacccaggagttggaggctgcagtgagctatgatcgaactactgcactccagcctaggtgaca[223 bp omitted]ggctgaggtgggagaattgcttgaagccgggaggcagaggttgcagtgagccaagatcacgccactgcattccagcctgagagacagagtgagactccatctcaaaaaaaacaaaaaacaaaaaacagaaaacaaaaaactggagaacacgatggcctgggaagaaaaagctccaagagctccaagatataatgtgaagtgaaaaaaatcaagtcacagaacaatgagaatagtgtgatacaatttacataagaagaaaacaagccgggcgtgggaacatttcttgtagttccagctgctcaggagactgaggcaggaggatccctggagcctaggaatttgtagtggcagtgagctatgatcatgtcactgcactcctgcctgggcaacaaaggaagatcccattcccatctctaaaaataataaaaaaacagaaagcaacaacaatcccaagctgcttttttttttttttttgagacggagtttcgctctttcgcccaggctggagtgcagtgtgcgatcttggctcactgcaacctctgccttctagtttcaagtgattctcctgcctcagcctccctagtagacgggattacaggcgcccaccaccacgcccggctgatttttgtattttcagtagagatggggtttcaccatgttggccaggctggtctcgaactcctgacctcgtgatccgcccctctcggcctcccaccaaagctgcttttttctgtgtgtgactgagtcttgctctgtcacccaggctggagtgtagtaacgcgatcttggctcactgcaacctccgttccctgggttcaagcagttctcctgactcagcctcctgagttgctgggactacaggcatgcaccaccatgccctgctaatttttgtattttagtagagataaggtttcaccatattggccgggctggtcctgaactcctgacctcaagtgatccgcctgcctctgcctcccaaagtgttgggattgcaggtgtgagccactgcacctggccccaaagatgctttttgatatatgtacacacacacacacacacacacacgcccagcaaaagatgtgcaaggatagtatagtaatgaaactcggggtgcacatgaaatgtgaggtctgtatcactcaatatttttgttgtttgagatggagtctctctctgtcacccaggctggagtgcagtggcatgatctcagttcgctgcatcctttgcctcccaggttcaggtgattctcctgcctcagcctcctgagtagctgagactacaggcatgcgccaccacgcccggctaattttttttttgaatttttagtagagacagtgtttccccatgttggccaggctggtctcaaactcctgacctcaagtgatctgcccaccttggcctcccaaagccctgggattacaggcataaaccattgtgcctggcctcaaatttttaaaaaagaagactatattcatacatactaagtatccctatatttttatttgttcatttttatttatttattttttaagagacaggatgttgttctattgcctaggctggagtacagtgacaccaccatggctcactgtagccttgccttcctggactcaagcaatcctcctgcctcagccttctgagtaactgggactacaggtggacaccaccatgcctggctaattatttcatttttgtagagacagggtctcacaatgttgcccaggctggtctcgaacacctgggctcaagcaatcctcccacccaggcctctcatagtgctgggattacagacatgagccaccacgcctggtctctctctctctctctctctctctctctctctatatatatatatatatatatatattattattattattattatttttcctcttttcttcgagacggagtctcactctgtcgcccaggctggagtgcagtggcatgatcttcactcactgcaacctctgccccctgggatcaagcaattcttctgcctcagcctctgtagcagctgggattacaggcatgtgccaccacgcccagctaattttgtatttttagtagagacagggtttcaccatgttggccaggctgatctcaaacccctgacctcaggtgattggcccacttcagcctcccaaagtcctgggattataggcatgagccatcgcgccctgcttttctttttttttttttttgagacggagcctggctctgttgcccagactggagtgcagtggtcgatctcggcttgctgcaacttctgcctcccgggttcaagcgattctcttgcctcagcctcccgagtagctgggattacagggacgctccatcacgcctggctaatttttgtatatttagtagaggtggggttccaccatgttggtcaggctggtctcaaactcctgacctcgtgatctgcccaccttgtcctcccaaagtgctgggattacaggcttgagccaccgtgcctggccccgggctccatatattttaaattgtcgtttaaaacttaggtggtcaggcgcagtggctcttgcctgtaatcccagcactttgggaggccaagtcgggtggatcacctgagatcagaacttcaagaccagcctgaccaacatggcgaaaccccatctctaccaaaaaaatacaaacattagctgggtgtggtggcacgcatccatagtcccagctacttggggaggctgaggcaggagaattgcttgaaccctggtggtggaggttgcaatgagctgagatcgcgccactacactccagcctgagtgacagagtgagaccctgtttcaaaaaaacaaaaacaaaaacaaaacaaaacaaaaaagaaaaggaaggagaaggaagaggagaggtggataattgatgttgggtatcaataaggaggatctgcattttaagttaggcctgttcataaaatatcttgaatgccaggacagttgcttggattgtattctctgggcagtggtgagtcatgggaagttttggagcaaggtagaacatccataccccagcacagcagttaatctttttctttttttcagggacaggagtcttgctatgttgcccaggctggaatgcagcggctattcacagaataatcataccacaccacacccttgaaaccctgagctcaagcaatcttcccacctcagcctcccaagtagctgggactacaggcacccaccaccatgcctggcttagcagtcactttttaagagatgacttccttggcaccacaatctagattatttccttttctatatgctctcaaagaacttggctcctttatttcatagcatcttgttttattagcatattatattgagtaatataattaggtagtgtaattataaatacttgactcccactgcaatgctggtgtcaggcaagcagggactgccttggtcttgattgtagttatagatctggaagctagcttaataattatctgctgaacaaatgaatgaatactctagagctgttgtttaaaagatagcaactcttccatccttccagaagttctcatgactgaacccacctaactgtggttcaaaggttcttggccgggggtccagggaccctcaaaagtcttgtggatataatttatggggtctatggccttagataagaagaaaaatcacaaatcacattttccttttccccaagctctaattgatatctagtatttcttcgttttttttttttttttttttttttttttttgagacggagtctcgctctgtcacccaggctggagtgcagtggcacgatcttggctcattgcaagctctgcctcccaggttcacgccattctcctgcctcagcc[135 bp omitted]cagcctcccaaagtgctgggattacaggcttgagccactgcgcccagctatttcttcctattttcatgtcagattgtattttccaaagatagcctcaataatatctcccattccatatgctcttccagatcttgccacttccccattgggaagtgaagactatgggaagtgaagactatgtctccacaccttgaacctgaagggactacctcaaccaacaaggattcaatagaagtgcttctgtgtgacttctgaggtcaggttgtaaaaatgccatgccttgttttcttagtacaaacactcttacaattcagcttccatgatgtgaggaagcccaagagtctgtgaggaggcccacatggagaggaaatgaaatccccagccctcaattccctctgagctgctagccaacagctagcaccaattcttagaactcagcctccgtgctgtgaggaagctcaagagtccacgaggaagcccacaaagagaggaaattatgtccccagcccttagtccccactaagttgctagccaacagtcagcactaacttgccagccatgtgagccatcttgaaagtggtttcttattagatgcactgaagacatgaatagaaaaataaaaataaaatacagaaagtgggttcttcagctcccagaggagctgcctcaattgttgcctcattgatcagagatgagctgcctctgctgaactccacccaaattgaagacctacaaacaaaataaataactactattgtcttaagcaattaagttttgcagtggtttgttacacagcagtagatgactcatacaattatgaatacaggtaacattagcaagatctgtgattttgtttattctggaatttattattctagcaacataaatcacagatatttccaaatcacatcatggttgttgcaaatacttgaaatattcttttgcttcctcactgttttgaaatatcagttataggccagacgcggcggctcacacctgtaatctcagcactttgggtggctgaggcaggcaggatcacctgaggtcgggagttcgagaccagcctgaccaacatggagaaaccctgtctctactaaaaatacaaaattagcctgacatggtggcatgtgcccgtaatcccggctactcaggaggctgaggcaggagaaatccttgaacctgagaagcagaggttgcagtgagccaagatcgcaccattgcactccattccaggcaacaagagcaaaactctgtctcaaaaaaaagaaaagaaaagaaaagaaaaagaaatatcagttattagacttgctattagatctgctagattttttttttttttttttgagatggagtctcactctattgcccaggctggagtgcagtggtgcaatctcgactcactgcaatctctgcctcccaggttcgagtgattctcctgcctcagcctcccgagtagctgggattacagccgcacaccacaacacccagctaatttttgtatttttagtagagaaggggtttcaccatgctggccaggctggtcttgaacttcttaccttgtgatccgcccacctcggtctcccaaagtgctgggattacagctgtgaaccacaacacccagcctgatttttttttttctttttaaatagtgacagtgtctccctatgttgcccaggctaattaaactcctgggctcaagcgatcctcctacctgggcctaccaaagtgctgagattataggcataagccactgcacatggctggatctgctagatcttgttatttaatgttaataaagaagcgtatatattatataaaaatgtgacttttgaatattttgaaaactgttttagttggttttgtaagcctatgaattttcttttatacacttaacttttttgagaaggtattgtcagggtataatattcaaaaaacagttaaaaacatgattcatacaaatatatagtaagcacacatctaggatttatttaatacattaatgggagaaccaaaagaatgacagacttgttcaaaggaggataggacaggccaggcacagtggctcacgcctggaatcccagcactttgggaggctgaggcaggcagatcatctgaggtcaggagttcaagtccagcctggcaacatggcaaaaccctgcctctattaaaaaaaaaaaaattagctgagcatggtggtgcgagcctgtagtcctagttacttgggaggctgaggagaatcacttgaacccaggaggtggaggctacagagagctgagattgcaccactgcactccagcctgggtgacagagcgacactctgtctcaagaaaagaaaaagagagaattctagatgaaaatgatgaatttatagagaaaaacagttaataacattcagaacaataacttttgggattttatgtctacccaaaaaacaataatttcgatgcattggttctgaacaagttaacatataactttacagagtttagacccttaatcaatagaaagtcatacaaattcccccagagtagtggttggcaaattgtggcccacagatcaaattctgcccatttttgtaaataaagttttatgggaacatagtcacatacattcatttatgtgttatcttattatcacttatgagctttttgcatgacaccagtagagttgagtagtggtaacagagaccacatggcttcaaagccttaaatatttatctgaccctttatagaaaaaaatttgcctccccattcctagaatatcagatgctacttaagtggtcttgttagacagtgcccttagagccctaatgtccaataaggtagccaccagtcacttagctatttaaatttaattcagatgaaataaaaaacaaaaaattcagttctcagttacactctctatttcaagtcttcaatagccacatgtggctagtggcttttgcacagttcaggtgtgttgcaaagtgttaccctgggaagcactgatgtcgaataacataggaagtatacactgtttgcattatatccagagttcagttaatctttctcaacaaggcccaaggcctgctaaagaaatatttcagttattcattactgcattaaaaaaaatccccccaatatgtagtggcttaaacaacgatttattatttttcatgataccatgtgttgactgggctctgcaaggcagttcttctgttcatctcatttctcttggagtctctggtcaaattggagtcaggtagtggcacggactggaacttttttttttttgaggcggagtctcactctgtcacccaggctggagtgcagtggcatgatcttggctcactgcaacctccgcttcctgggtccaagcgattcttctgcctcagcctcccaagtagctgggactacaggcatgcacaactgcgccgagctaatttttgtatattttttttagagatgggggtatcacc[139 bp omitted]tggcgttgtggtggggtagctgggagggttgcaatgatctctctccatgtagtctcttcacatggctgcttggaccccaaaagggagagtttcaagaggacaagcccaaacatacaagtactttaccaaacttctgcttgcatcatgtttgataatgttgtactggccaagcccaatatcccatggaggggactccacagggtgcaaacatctggaggtgtggttcactgagacccttcagggtccatggtgcaagaacaggttgaagacccccccttgaatttccacctgttgtatgagtccctttcacccatcctgagcagccaccacatcccactgagtctacgtagctcctcaacctaggtaatgcctggtgctcagtgtgggtcctagtgcagctgctgcaggctctctgccctggtgacaggctggcttccctccatcaagatttggaagggagggctctacctggtgacttctctcttgtccaagggggtctctccagatctgggctccttgccccagcaccaccagtcccactttttttttttttttgagacagagtctcactctgttgcccaggctagagtgcagtggcgcgatctcggcttactgcaagccccgcctcccaggttcacaccattctcctgcctcagcctcccgagtagctgggactacaggcacctgcaaccacgcccagctaattttttgtatttttagtagagatcgggtttcactgtgttagccagggtggtctcgatctcttgacttcatgatccacctgcctcagcctcccaaagtgctgggattacaggcatgagccaccgcgcctggcctaccagtcccacatttctaatgtcctatcagctcctccagtctccctggaatctcttcctctaaatctattgtgtctgccctgcccagggcttttgaaattcaaaagccaaaaatggccttctttgtcgtctgcattctgccttttcctgtgatatggcctcagaaagctagagctgttgcctgaacgaatgggtgaacaacagtaaacatttgtg[141 bp omitted]agaaaccgtctctactaaaaatacaaaaaattagccagctgtggtggcaggtgcctgtaatcccagctactagggaggctgaggcaggagaatcacttgaacccggggggtggaggttgcagtgagccgagatcgcgccattgcactccagcctgggcaacaagagcgaaacttcatcgcaaaaaataaataataaataaatcaatcatctccaaactcaaaacaatcattgtttattatctcatgatttctgtgagtccagagtttggtgtttcatgtggttacagtcagatatcaactggggctgtggtcatctgaaagcttgactgaggctggatgatttgccacctgggcttgttcacatggctggcatgttggagctggcaagatggttcctctccacagagctgcttgagtgtcctcacaacatggcagccagcttcccccaaagcaagttatctatggtggaagttgcaatgccttttgtgacctagtctcagatttcttttactgtcacttctgttacattcctttgatcccataagccaaacctgattccatagggaggagactacacaaagatgtgaccactgggtggcgggaatcattaggcgccatcttggaatctgtctgctgcaatctggggctgatatcacatgcagttaaaataactgaaacttggccgggcacggtggctcacacctgtaatcccagcactttgggaggccaaggcaggcagatcatgaggtcaggagttcgagaccagcctgacagacatggtgaaactgcatctctactaaaaccataaaaattagccgggcatggtggtgggctcctgtaatcccagctactcaggctgaggcaggagaattgcttgaacccaggaggcagagcttgtagcgagccaagctcgcaccactgcactctagcctgggtgacagagtgagactccctctcaaaaaataaataaattaaataaataaataaataaataaataaataaaactcatccatctccaattgtctaggacactctgatctttccttccttccttccttccttctttcttttttttgacacagtttcgctcctgttgcccaggctagagtacagtggcgcgatctcggctcaccacaacctctgcctcccctgttcaagcaattctccggcctcagcctcccgagtagctgggattacaggcatgcaccaccacgccgggctaatttttgtatttttagtagagacagggtttttccgtgttggtcaggctggtctcgagctcctgacctcaggtgatccacccacctcagcctcccaaagtgctgggattacaggcgggaaccatcgtgcccggccgatttatctttcaaagccgtggctgaaacgttccccactgaccaatgacactgctgccagcccctggggggaccacgttgctctgttcccggtgacgtagctgccttaacgcgtccagtgggtcgtcccaattcccctctggctttgcacttgtgtgtttgcacatctgctgttaatttaaatgagacaaaaatcctcactctctttaaatgcagagaatacagagttgtgggttttattttacctttttttacaaagagaaaagagcgtgatgcatactaaggatcctctgttggctccacaaaggcgtcttctaagtatgcctttggaattcagagccggcagttaaattctgatgaccaaatctgagaagtaagagtcgtggttttcttggggatggagggaatgggaatgagggctcccgggataagggatggggatgggcttttgggaggctgggaatgttcttttttttttttttaacctggttgcagcataactgatgtgttcatttggaattaattcatcaagctgtacacttttgaaacgtgttgtctctttttttttttttttttttgtgacagagtctcactctgtcactccggctggagtgcagtggcacaatctcagctcactgcagcctccgcctcccggttcaagcaattctcctgcctcagctgcccaagtagctgggattacaggtgccgtgttatcttatgtttgtacagtataacccaataaaaactataaaaaatgttattgacagggaaacaaataatcaaataagataacaaatcagagtcaaagactgtttagaaacaggattgtccagtggttaagagcctgggctgtttatatttgaatcccagtgtgccaccaaggctgtgtagctttgggtaagttactcaacttctcggaccttaaagttgtatatctgtgaaatgaagacaacacctacgtctacctcaatgagaagcaggaaatatgattaagaattgagtttaggactgg[273 bp omitted]caaaaaaaaaaaaaaaaagaaagaaagaattgagtttaagactgggtgtggtggttcacacttgtaatctcagcactttgagaggccgaggcaggaggatcacttgagtcccagagtttgagaccagcctgggcaacataatgagactcccatcactataaattttttttttaattagctgggcgtggtggcatacacctgtggtcccagctatttgagaggctgaggcaggaagatagcttgagcccaggaggtcgaggctgcagtgagctatgattgtgccactgtactccagcctgggcctggagtgagatcctgtctctaaaaaacaccaaaacaaaacaccacaacaccaaaacaccaaaacaaaacaccaaaacaccaaaaaaaaccaccaaaacaaaacaacagggtttactcaagcacaaagtttgagatagccagactctgaaagaatgtggtgattcttaagtggggaagaaaaggtttcacttatgtaggcagaaacagagaagtttaacagcatttaacatgttccatacaaagccagtacacaacgttctgtgatatgatcggtggcagtttgctagattttaacgaagatttattttttggtttttttgttggtttgtttttgagtctcactctgtcgcccaggctggagtgcaggggcgtgatctcggctcactgcagcctctgcctcctgggttcaagcgattctcctgcctcagcttcccaaatagctgggagcacaggcacatgccaccacgcctggctaaattttatatttttagtagagacggggtttcactgt[140 bp omitted]tgagggggtctcatctctgacgccattccattacttctcatcatttccaggaagaagcagaagttgcagttgctggctgcatgactcaagccacttagatttctcttgaggctcaaaataatgtaatgttccaatagctttaagtttgaatgatttaatttcacacctaccgggcagaattacctgagataaatagaacaaagcatctagccaggtagttgtcacagagcagatgttcaatcaatgacattcatatcgttttgg[134 bp omitted]aatggtgaaacctgtctctagtaaaaatacaaaaattagtcagttgtggcggcgtgtgcctgtaatcccagctactcaggaggctgaggcaggaaaatcacttgaacctgggaagcagaggttgcagtgagacaagatcatgccactgcactccagcctgggtgacagagcgagactccagctcaaaaaaaaaaaaaaaaaagaaaagaaagaaagaaagaaatagaaaatgcagaactgtcatgccaataaaaaatggacaaggacgtgaacagacaagtcacaaggcagaatgacagtagattacaaactggtgggaaggtatttatcctcagtactcactgtttttaaatttctttgtgtgtgtgtgtgtgtgtgtgtgagagagagagagtctcactctcttgcccaggctgtagtacaacagctcaatctcaactcactgcaacctccatcttccaggctcaaatgatcctcccacttcagcctcccggaaagctgggggactacaggcgaccgccaccacgcccggctaattttttttttctttttttttttttttgagacggagtcttgctctgtcgcccaggctggagtgtagtggcgcgatctcgactcactgcaagctctgcctcccgggttcatgacattctcctgcctcagcctcccgaggtagctgggactacaggcgcccgccaccacgcccggctaattttttgtatttttagtagagacagggtttcaccatgttagccaggatggtctccatctcctgacctgatgatctgcccgcctggacctcccaaaatgctgggactacaggtgtgagccaccacaccacgcccggctaattttttgtatttttagtagagacagggtttcgccatgttgcccaggctggtcttgaactcctggactcaagcgatccgcccactttggcctcccaaagtactaggataaaaaatttattattattgttatttttcattttttatagaggtggggtctggatatgttgcctcaggctggtcttaaactcccgggctcaagtgagccttctgcctctgcctcccagtgtgtcgaggtcacaggcgtgagtcactgcaccggccagtagtaactgtcttcagagcgtgtattgttctctgaagtaatcaagtccacttatttgtctgtatgtttaccgtccatctcccctcttctcatcccttagaaaatgaggtccctgccaggcacagtggctcaggcctgtaatcccagcactatgggaggccgaggtgggcagaccacgaggtcaagagttcgagactagcctggccaacatggtgaaaccccgtctctattaaaaatacaaaaattagcctgggctgggcgcagtggctcacacctgtaatcccagcactttgggaggctgaggcaggcggatcacctgaggttgggagttggagaccagcctgaccaacgtggagaaacaccatctctactaaaaaatacaaaattagccgggtatgctggcacatgcctgtaatccctgatactcgggaggctgaggcaggagaatcacttgaacccgggaggcggaggttgtggtgagccgagatcatgccattgcactccagcctgggcaacaagagtgaaactctgtctcaaaaagaaaagaaaatgaggtcctcgagggcagtgcttctgtgtcagtcttgctcactgctgtctcccagtacctaaaacacaggctaccatacagcaggtgctcaagaaactatttgtggactcaatgagtgaatacataaatgaaaatgagagccaactcttcacttaccaaattagcaaagctctctaaaaggcttatattcagtgccagcgaggatgccgtgagtgtgaatgagtggagattattttaacttttctagatgccaacttggtactcttaccgagtaattccatttctgggactctgttctaaggaaataatataaaatgtgcacaaaagtttatgcacgaagattttctctatagcattatttgtagcagtaaaaataatagaaacaggtttaatatttgtataataaacattatatatttctaacaataaggtctagagaaaggctttgtaaactacagaacagcaatattgtgaaatatcatgtaattattttaattaaaatgaaaaaaaggttttatgatacattaagtagaaatacgcagggccggacatggtggcttatatctgtaatcccagcactttgggaggccaaggtgggtggatcacctgaggtcaagagtttgagaccagcatggccaacatggtgaaaccctgtctctactaaaaatacataaattagccgggtgtggtggtgcgcacctataatcacagctactagtggggctgaggcaggagaatcacttgaaccccggaggcagaggttgcagtgagccgagattgtgccactgcactccagcctgggcgacagagtgacactccatctcaaaaaaaaaaaaatgtgtaatacagcaagatataaaatgatatacggtcatccattggaatccataggggatttggttccagaaccccacctaccctacagataccaaaacctgaggatgctcaagtcgctgatataaaacggcatagtgtttgcatagaacctgcgtgtatttcccctgtttatttatttatttatttatttattttttgagacagagtctctgtcaccccaagctggagtgcaatggcgcgatctcggctcactgcaacctccgccttctgggttcaagagattctcctgcctcagcctcctgaatagttgggattacaggcatgtgccaccatgcctggctaattttatttcattttataataaaattttattaatttaatttaattttattttatttatttattttgagacggagtttcgctcttgttgcccaggctggagtgcaatggcacaggctccgctcactgcaacttccacctcctgggttcaagcaattctcctagctcagccttccaagtatctggaattacaggcacacgccaccacgtccggctatttttttttttttttgagatggcgtctcactctgtcatccaggctagagtacagtggcgcaatcttggctcactgcaacctctgcctcccgggttcaagcgattctcctgtctcagcctctggagtagctgggactacaggcgcatgccaccatgcctggctaacttttttgtatttttagtagggacgggatt[132 bp omitted]ttccaccatgttggccaggctggtcttgaactcgtgacctcaagtgattcacccaccttggcctcccaaagtgctgagattacaggcgtgagccaccgtgcccagcctcctcccgtgtattttaaatcatctccacattacttggaatgcctaacacagtgcaaatactaagtaaatagttgttatactgtattgcatagggaataatgacaagaaaaaaagtctatacacattcagtacagacacaatttttttcctgaatatttttgattcactgttggttgaatccacggatgcagaaacccacggaactggtacgcagtagcacctcctctctctcacactatatatagagagaggggattttatttatatatgtcaacgtagtgtaaatgtaagttttcatatatacatgtgaaattggtaggacaacaacaggatgctaaccacacaattttacaaagataaaacctggaaatactggaagtagatgtatcggaatgctatcactggtgggagaaatgtgactccttgctgggggacatactgttatctgtgggatgtatctcctcgcagagttttttttctgtatatttttcccacatatttatttatgtatttttttaaatttttatttatttatttatttttgggtggggagacagagtgtcgctcaggctggagtgcaatggcatgatcttagctcactgcaatctctgcctccgggttcaagtgattttcatgcctcagcccccaccagtagctgggaccacagtcaccggccaccacgccctactaacttatgtatttttagtagagacggggttttgccgtgttgttcaggctggttggtctcaaactcctgacctcaagtgatccgcccaccttagcctccaagtagctgggactacagatgtatgccactatgcctggctaatttttttattttgtagcgatgaggtctcactatgttgtccaggctggtctcccactcctggcctcaggtgatcctcccaccttgacatcccaaagtgctgtgattacaggcctgagccaccgtgcatggtcctatttattcatctattttgtagagacagggtcttgttctgttgcccaggctggaatacagtggtgtgatcatggctcactgcaaccttgacctcctgggcttaagccatcctcccacctcagcctccaagtagctgggactacagatgcatgccaccatgcctggctaatttttttattttgaggtctcactatgttgtccaggctggtctcccacttctggcctcaagcgatcctcccaccttggcctcccaaagtgccaggatttcaggtgggaaccaccgcacccggtctcggtttgatcactttaattggctgcattgcattgcaagaatgactgtatcttggtttatttaatttttcccttatgcacggcatctgggttgtttccagcttctttcccatgacaaacataaacaacactgcagtaaacatcactgagttcacgtgatttggagatgtggaaattcaggaacgaagggggcccttatctaaatgtcaaccgacctgtcccatggcctccagagagactgcatgtccctcctcctccattgttttgcaattctcagcttttctattttgagcttgtgttatttttcttatttatttatttttattttaattgaagttctgggatacatgtgcagaacacgcaggtttgttacataggtatacatgtttcatggtggtttgctctatctatcaacccatcatgtaggttttaagccctgcatgcattaggtatttgtcctaatgctctccctccccttgccccccaccccccaccgacaggccccggtgtgtgatgttcccctccctgtgtctatgtgttctcattgttcgactcgcacttatgagtgagaacatgcgttgtttggttttctgtttctgtgttagtttgctgagaatgatggctaccagcttcatccatttcccttcaaaggacatgaactcattcttttttatgactgcatagtattccacaatgtatatgtgccatattttctttatccagtctatcattgttgggcatttgggttggttccaagtctttgccattgtaatgtttatttatttattctttaagataagagttttgctctgtcgcccaggcctgagtgcagtggtgcattctcggctcactgcaacctccacctcccgggttcaagcaattctcctgcctcaggctcccaagtagctgggattacaggtgaccaccaccacacctggctaatttttgtacttttggtggagatggggtttcacctt[138 bp omitted]gtgaattcttcccagtttgttgagagagctgtgggtctatggtgctgaggggagtagacaaagcccctcctcctgacaccccaaaccaatgggggagacagacagagcttccgacttccttagcttggggactggcttttaaaaaccgcacagggctgggtgcggtggttcatgcctgtaatcccagcactttgggaggccaaggtgggcagatcgcgaggtcaggagttcaagaccagcctagccaatatggtgaaatcccatctctactaaaaaatacaaaaagtacaaaaaatagccacgtttggtggcctatgcctgtagtcccagctactcaggaggctgaggcaggagaatcacttgaacctgggaagcagaggttgcagtgagccgagatcacgccactacactccagcctgggcgacagagtgaggctccatctcaaaaaaaataaaaataaaaataaataaaataaaataaaataaatgaaagtaaaaattgcccaggagccaggtgtggtggctcacgtctgtaatctcagcactttgggaggccgaggcgggcggatcatgaggtcaagagttagagaccagcctggccaacatggtgaaactccgtccctactaaaaatacaaaaattagctgggcgtggtggtgggtgcctgtaatcccagttactcagtaggctaaggaaggagaattgcttgaacccgggaggcggaggttgcagtgagctgagattgtgccattgcattccagcctgggtgacagggcaagactttgtctcaaaaaaaaaaaaaaaaaaaaaaacaaaactgcccaggaaattcttacgcgcagtcctacgtggggactagcggcccagagctactgcttattaagcatttattatgagccaggaaaggtgcaaaatgttttatccttgagtctagttcatgcctccagcagaagcccaggcccctgggttctagcatggtcttctgccagcttcgacttggacaagtgacgtcagtgccctgtatgttggttttctcattggaaagatggagataataatagtgcctactcataggatcatcatgaggctgaaacgcgtagctgtgcagatctcttggcactgtgccaggcactgagtatgttctacacaagtgtttgacaaatataataaaactgatggctgggcacctgtaatcccagcactttaggaggccgaggcaggtggatcacttgaggtcaggagttcaggaccagcctgggcaacatggtgaaaccccctccctactaaaaatacaaaaattagcggggcatgatggcgggcacctgtaatcccagctactcgagaggctgagacacgagaatcgcttgaacccgggaggcagaggttgccgcgagccaagatcgcaccactgcactccagcctggatgaaagagcgagactccatcccaaacaattaacaaaaataactgactgtgtatcttggagtgacagagctgtccctgcttgtgtaatgtgcctatccatgcattggcgaggcgtgtcgatcctgcagctgggagagagtttgcatgggaggaggcagcgtgagagatcagtccccaggcacagaggaaaaccgagctgggactcagctctcacggtcctgccattcagccagctgagaggcacagtcccacatccagacccttacttgtgctgtctcctctgtccagaacactctttcctttcctcacctccttcaaaggcttgttccaatgtcatcatcttggtttaaagtggagattcagcttaaccccttccccacctgtgcctactgtctctcgattggccttattcttctccatggccctcaatgtacacgtttacctggaaagtgctccctgcaaggcagctgcataccattattaagactctgtgacaggccgggcgtggtggctcatgcttgtaatccagcactttgggaggccgaggcgggcggatcacttgaggccaggagttccagaccagtctgaccaacatggtgaaaccccgtctccactaaaaatacaaaacttagcctggtgtggtggtgagtgcctgttatcccaggtactcgggatgctgaggcaggagaatcgcttgaacccgggaggcggaggttgcagtgagccgagatggaaacactccactccagcctaggtgacagagcgagactccgtctcaaaaaaaaaaaaaaagaaaaaagaaaaaaaaaagactctgtgactacatatatacacacacacacacacacgcatatatatatatatatatgcgtgtgtgtgtgtgtgtgtatatataggtgtgtgtatatatatatatatatatatatataattatacacacacacacacacacacacacacacacacagagatgaggtctcactatgttgtccaggctggtcttgaattcctgagctcaaccgattcttccacctcactcccccaaagtgctgggattacaggcgttagccaccacacctgggctactaatatgtatgtatgtatatatatatatatatatatttttttttttttttttttggatacagagtgttgctctgtcacccaggcttgagtgcagtggcgcgatctcggctcactgcaagctcctcttcccaggttcacgccattttcctgcctcagcctcccaagtagctgggattacaggtgcccgccaccatatccagctaattttttttatttttagtagagatagggtttcaccgtg[136 bp omitted]cccaggctggagtgcaatggcgcgatctcggctcactgcaacctctgcctcccgagttcaagcaattctcctgcctcagcctcctgagtagctgggattacaggcacctgtcaccacgcccagctaattttttgtatttttagtagaggcagggtttc[137 bp omitted]ggtgtgtgggccaccagctcctcccccatgttctctgctctggccgcactggcctcctttacattcgtctatcacaccaggcacctttccaccacagggcctttgcactggctattctcaatgactgcaatactcttgccccagatatgcacccagcttgctgcctcacctccatcaggccacctcctctgagaggcccaccttgactgcccacctaaagcatctcttagtttagccaggcatggtgttgagcgcctgaagtcccagctattcagaaggctgaggcaggaggattgcttgagcccaggagtttgataccagcatgggtaacatagccagaccccatctctacaaaaataaaacataaaaaattaaggctgggcgcaatggctcacgcctgtaatcccatcactttggaaggccgaggcgggcggatcacctaaggttgggagttcgagactagcctggaca[138 bp omitted]cacggagaaaccccgtctctgctaaaaatagaaagttagctgggcatggtggtgcatgcctgtaaccccagctactcgggaagctgagcaggagaatcgcttgaacccgggaagtggaggttgcagtgagctgagatggcgccattgcactccagcctgggcaacaagagtgaaactcagtctcaataataataacggtaataaaataaaaaattagctgggtgtggtggtgcatgcctgcctgtaatcccagctactcgggaggctgaggcaggaaaatcgcttgaacccaggaggcagaggttgcagtgaaccgagatcgcgccattgcactccagcctgtgcaacgagagcaaaactccatctcaaataataataataataataataataataataataataataaaataaaataaaataaaaaactggctgggcatgggagcacgtgcctgtaattccagctattcaggaggctgaggcaa[145 bp omitted]tgggaggtcacatgttcgcactttctaggattaggacccgaacatctcttgggggggcaatgttcttcccaccatgagtccgttctcactttttttttttttttttttgccactctgtctccagcgcctggaacggtgcctggcatgcaacaggtgctggggaatgaatgaacgtgaatggatggggcccagcggcaggaagggctggaagcatgtgtcatggagcatgttttcagggactgagggccaaggaggaagccaggcccctggaggaagtgggggcagtgccctggcccgaggcaggaggaggaggagccgaacagggatgagcaagatgagggtgggaggtggaaagatgaagcagcgattggggcgtcctgttctcctgtaatccggcctcctgcccacccatgcaccaccctcgggctgggcgcaggcctccctgaagccactgcagggaaggggggtatcggagggtggtggtgcacggtgattcccaactggcacagctggtttgactggtcctggcgtttggcagaggagagcgccggggacaggtgaggatggtgctgggagcaccccaggcccaaaagacacaggggaggagtggctaccgtgctcaccggtgtacccctatagaccccagaccccccaacacaacactcccaccgcacacccctcacttggctcagtctgtcccagcccaggaaaccagaaacccaacctccctgacccccagtcccagcccttcctccctcagacccaggagtccagcccctcctctctcagacccaggagtccaggcccccagaccctcctccctcagacccagaggtccaggcccccagcctcctccctcagatccaggagtccaggcccccagcccctcctccctcagatccaggagtccaggcccccagcctcctccctcagacccaggagtccagacccccagcgcctcctccctcagacccaggagtccagacctccagcccctcctccctcagacccaggagtccaggcccccagcccctcctccctcagatccaggagtccaggcccccagcctcctccctcagacccaggagtccagacccccagcgcctcctccctcagacccaggagtccagacccccagcccctcctctctcagacccaggagtccagacccccagcgcctcctccctcagacccagaattccaggcccccagcccctcctccctcagacccgggaatccaggcccccagcccctcctccctcagacccgggagtccaggcccccagcccctcctccctcagacccaggagtccagacccccagcgcctcctccctcagacccaggagtccagacccccagcccctcctctctcagacccaggagtccagacccccagcgcctcctccctcagacccagaagtccaggcccccagcccctcctccctcagacccgggagtccagacccccagcgcctcctccctcagacccgggagtccagacccccagcgcctcctccctcagacccaggagtccagacccccagcgcctcctccctcagacccaggagtccagacccccagcccctcctccctcagacccaggagtccagcctccagctctggttccctgacacattgtcactacagccgtggcctgttgggccccctgctctgtgtgcacctgcctctctccccaccctgttccccttttgtgaccatgcagccagtaaggacccaggttctggccttcagtccccccaccccactcccccagcatccctccccagtctctgtcaccttggggacccaggagccggcactctcagtggccccctcccaagagaggagcctaggcgtggtgtggggcccaccccaagtggcctccagcccagccccagcccagctcagggcaggcggggcatgagtgtgagtgtgagtgtgcggggtggggcgggcggtggtatcggccctgggggcctgtgccggcacatcgtggggatggagtaatcagggtggggtggggagcagacaaggaggtttcgctgcaccccaagatggacccagtgattagaggggacggctggggggaaccagcgtggctttgaggtgtcagccgccatctctcaccccacccatctgaggttgcctgagcctcaagggggcattgcgtgggcttggggacaggggtgtcctctaccacccgtaacctccccccaacccccttccccaggtccacatgtctaagtgtcccatttttgtctgtctgggtcactggggtctggcccaggcccctcctccatcaaacccaggagcctggtcccccagctctggaccgtgcccccttcccaccccattcgggttcctccttggatccttcctgacttgggatttggacgccccgcccccagcccctgccccctcgggaacccagcctctaagcagccagggctggctgtcctcgggctcccagaactcccggcaatgactggcttttaatggaaaggtcgggctctggaggtgacaatggcctcgattctgtggaaacgtgacctcatgacccagtgacctccctttgcctatgtctgagctccaagagcaaaatggcacatcccagggcttggggggcaggtgggcccccccaagagaggccaaggaattgctccacgatgggagtcccctgctgtccaccctcagcccattggcaaggccacttccaatgcccccttcgcaatcagcccaaggtgtagaacaggagacagcctccttgtggtcggtggcacacaggtgacgtgtccatcgtgctttgggtttatgggagtggagggcatgtcctgagtggcccagcccatccccacctgccacccttaagcccccagggatgggtgtgagtgtccctggacgccctcactgtcaacccctacccaggaacccaggactacctccctatccccagtgctattctttgttttgggggcttttgttttgttttgtttgttttgttttttgagatgaagtttccctcttgttgcccaggctggggtgcaatggcacgatctcggctcaccgcaactgccgcttcccgggttcaagcgattctcctgcctcagcctcccgagtagctggattacaggcatgcgccaccacaccgggctaattttgtattttcagtagagacagggtttctctgtgttagtcaggatgatctcaaactcccgacctcaggtgatctgcccaccttggctgcccaaagtgctgggattacaggcatgagccaccgcgtctggcctgttttgttttcgtcacccaggctggagcacggtggtgcaatcatagctcactgcagcctcaacctcctgggctcaagtggtccttccacctcagcctcccgagtagctgagaccacaggtgcaccgacaccatgctcagataatttttaaattttttgtagagatgaggccttgtagcccaggctgatatcaaactcctgagcttcagcgatcctcctgcctcagcctcccaaagtgctgggattacagaggtgaggcactgagcctggcccccagaggccccctctttggcctggaggaaacacctcccaatgtctttccagcctctaggcctttgtctctgccaggctttctaacaagacgccttttccaccactcaagtcccacttacccatctggtgagttcctctgtccttggttttgcctactggggcatccttttcctgggaagtcattcctggcctcccaagaaggtcctggcctctacagccagggtatcaagcacatggaacttagcccaagccagcagtcaatacaaatagcctccaagcacacacca[138 bp omitted]cgtggtgaaaccccatctttactaaaaatacaaaataattagctgggcatggtggtgcgcccctgcaaccccagttactcaggaggctgaggcagaagaatcacttgaacctggaaggcagaggttgcagtaagccgagatgcacagatcgtgacagagtgagactctgtctcaaaaacaaaaaagaaacaggtaaaattaattgtagttttctccagctttaagactggaagggccaggtgtggtggctcacctgtaatcccagcactttgagaggctgaggcaggaggatcatgaggtcaggagttcgagaccagcctggccaacatggtgaaacttcatctctactaaaaatacgaaaaaaaaaaaaaattagccgggcatggtggtgggcgcctgtaatcccagctactcaggaagctgaggcaggagaattgcttgaacctgggaggtggaggttgcagtgagccaagattatgccactacactccagcctgggtgacagagcaagactccgtctcaaaaaaaaaaaagactagaaggaaaaaagaaaagaaaataattaattgtaggaatagattttattcaatttgatgtatctaaaatatcaccacttcagcatgtaatcaatatagaaattacccatgagatgttttatatgctttgtatctcaattttgatgctcaatttcgaaaaggtacattaaaatggaattaattaaatgaaaatttaatttcatttaaattaattaaaatgaaataattttttattttttaaaaatttttaaaatgaaataaaattaattcattttaattaatttaaattaattttaatttttttaaattaaatttatttaaattaattaaaatgaaataaaatggaaaattttcactttctcagtcacattgcacataggtgctaaatagccacctatggccagtggcttctgggatggacagcacagatgtaagccatttacttacatgtcttgtttgtggacacaatatcagagactgacccagaggaggtctctacagatattagttggaaaaatagactattggatgcctggatgaatggatgagtggatgcatggatggatggatggatggatggatggatggacggatggtcgaatggatgggtagatggttggatggatggatgaatggatggaggatgcatagaaagatggatgcatagatggctggttgaatggatacctggctgagtggatgaatagaggatggatggatggatagaaggatggttgagtagatgcttggatggatgaatggatagacagtgatgaatggatggcaggatggatggatgaatggatagatgaaggaatggttgggtgatggatgaataaatggctgaatgaatgcaggatggatggatagatggatggttggatggttgggtggctagatgaatggatggaaaatggatggatgggtgatggatggctggatagatggatggttgagtagatggttggatggatgaatggatggatagatgatgaatggatgaagaggtggatggtttgatggctgatgaatggatggagggatggatggttggatgggtagatagatggatgttgaatggatgattggataagtggttgggtggctgaatgaatggttgggtggatggtcgggtggatggatgatggatgaatagagggacaggtggatgcatagatagagggatgaacagctggagggatgaatggatgtataatccttgctcctctcactacccatgaccaagtggctctgggttttccacttgcattttcccacactcttcatctttttttttttttttttttaattgagaccgagtcttgctctgttgcccaggctggagcacagtggcacaatctcggctcactgcaatctccacctcctgggttcaagcaattctctgcctcagcctcctgaggagctgggattataggcacccaccaccactcccggctaatttttgtatttttagtagagacggggttttactatgttggccaggctggtcttgaactcccgacctcgtgatccacccgcctgggcctcccaaagtgctgggattacaggcatgagccaccaagcccagcccactccttcatccttctggtctcgtccttgtctcccagatgtccaagaccctcagattcatttctgggggttgatggtctccactagtatctctgcactctcacaattggctaaaatgtcactctggtgtcttctggttcctccttgccacctctgtaggagtctggacccctcgccttccagaatcaggcttttgcatctcctcagctccctcctcattctccacagagattcagtggacttctcctggcaccaccatgaccttcactcattccatcacgtcttcctgtgacaattcattcattccatcaacaggcacttattgagcatttactatattccaggctcttcccttgggaaataaccgcagatttgacatagaacaagcccttctttcatggggttgacagtctagtggggagatagatggtaaacaagacaaagaagcaaaacatttaggaggtcagatggtgacgagtgctatgggaaaaagtaaaacaggaaagaggaatggagaagttggtggacgagcctgggggaggtgacactgggcagagtcagacgataggagcccacgaagctcccaggtatcaggaacatgcgggaatagcaagggcaaaggccctgcagtaggagcctcccctgggtcttaggccgcctagtttggccagtttctttccattgcccactcaggcacaacctcaggccctactgctccccaaccttcctgtgccccggggatgcctccgcacctgcctgcgagtttccctctcaggatccctaaggacctgggcattcccttccccagactctccctaaccccccaccccagcagcacacagagccagggacaaagggtcattgaatagaaaacaaaggtgaagacagcccagccggaggcctggtggggtgtcatggttcagtcccccacctccgacatcagaggggttcactcagcctcagagggggatgcctggccctctcacccttccacccaccctgcaagagagcctttttatcagcaggaacatcaaggcttaacactgaaagtatcaaggcagaatgttgaggatgtggactcggtagtggctgggggcaggggcgggtgctcccacagctcagcctcctggagacgggtcttggggtggtgaattgagagatgggataccccagaaccctccttttctgcttaccatcagagtgaaggcgggcagtgctgtgtgccctgggggaagccacattacctctctgggcccccttcctgcatctgttaggtgagtctgacgtcttccatccccctcacctatgcaacaataattggtcagtatatacaattttatttgttttggctttttttttttttctttttgagatggagtttcactcttgttgcccaggctggagtgcaacagtacaatcttggctcgctgcaacctctgcctccagggttcaagtgattctcctgcctcagcctcccgaatagctgggattacaggcacctgccaccatgcccagctaattttttgtatttttagtagagatggggtttcactatgttggccaggctggtcttgaactcctgacctcaggcgattcacccgcctcggcctcccaaagtgctggaattacaggcgtgagccattgcacaggctttcttttggcattttttttttttttttgagatggagtctctctctgtcgcccaggctgcagtgcagtgatgtgatctcagctcactccaacctccacctcccaggttcaagcgattctcgtgtctcagcctcccaagtagctgggattacaggcacctgccaccactggtggggagactggcttcatgactccaggactctgaggggtcagggaccaacagctggggagggccagggtttggggtgggggcagaagagaagagaacaccgtctatgctgagctcactgtgtaccagatcctccaccagcagctgagagtgtctccctcagtcctcacaacagcccgatgggtgccattcacagatggggaaactaaggcaagatgagcctatgagcaagatggttcccggccccacagctgggaggcactggagctgggatttgaaccagggctgtgaccttcagactctcacgcccaaccatatctggcagttgtctctcatatctgtgtctctccctgtccctgacctttctatgtatctctgtctctgccctctgtatatcgctgctgggtctctcagggtctctgacccctgtgtgtctctgtctcctctgggtgtccgtgtgtctctgtctccgccctccgtgtatctctgttgcgtctctcaaggtctctggcccctgtgcatctcagtcccctcctggtctctgtctcccatgccctctgccctctccctttctccctggctcccgccctgtctgtgctgccgtggtcctggctgtgcctctgtccctgtgtctgtttccagggtgccccttacgcgtcagcccgtgagggcaagtttctgtctgccccttccccagcggtggcctagtgcttggaacagcgcctggcagacaggagatgctcagtaaatatttctcaaatgaataaaggaatgaatgagtgaatgaatgaatgaatgaatgaactcgctgagatgggcgagatcagcgccatttcccaaatgagcaacgtgggctccaggtgggtgcccacaggcccagaactgccagcccggaaggttctggcgtgggcttggcactgaccccctggactctgcccccagctgagcaccagacgccaggacgtgcccatcactgctcctccccgccctcagagcagggtggctccctctggcctctccccgctgttggaggcgtgggtagcagctgggagaaccggctgggtgctgcccctccccttgggccgggcacggagtaggcacctggcgggctccccaggtggcagacgctgtcgctgcgcacacctggcctctgtgccgcctgctccctgctcgtcctcccctccccaccctcacccacctgccatggacgggcccgccgagccccagatcccgggcttgtgggacacctatgaagatgacatctcggaaatcaggtgaggcccagacctgggcaggagccaggagatcccagggaggaggtggctgtttgggggagccggggactgtggcaagggtggcctccagccacccgcagccgcaggcctggcccagacttagctggaggggctgggctgggctggggcatccagtgtggtgtataggtccctcctgagaagggagtgaggacccgaccgtgttgagtcaccagtggggatgcctggggtgtccctgtcgctctccgggcctcagtttttctgtctgtcaaaggggcccacaagccctgtgtctccctgatagagcagtggaagagagcaggcagcttggtgcatagtagttgctcaggaaacacaacagcctgtagtacccaggacaccccatgcaagccctgaaataacgggggtgcttgggggtgaaatgggagagactgggatgctgctgagacccccagagggagaagctgtgttctagggcacttggggcggagagggcaggctctggactcttcaggtctcctaacagtggttagggcagagcactgcccacttccatgagctcagcgtgactccctcttcctggggatgagtcagacactttgacagtacctgctttccagatggggaaactgaggctgggagggaacgcgacatgaccgcaattacgcagctagaagcaaatctgaacccggtctgtctcacgccagagcctgtggtttctcctgctcctcacagccttggtgatgtcccctttacacccctccccgtggctccatcttttaggggagcgcagaggcccagagagggcaggcagcctgccccagatcacacagcaaactgctgagacaatctccaacccctcgtatcttgcactcttgccaagtgagaccttcctggcagcctgggcccctccagccaccgtgggctgtgaggagggagacaaccaagacctgttctcagcccagttgcctcattcctttcttattttattttatttttttgaaatggagtttcgctcttgttgcccaggctggagtgcaatggcacgatatcagctcactgcagcctccgcgtcctgggttcaagtgattctccagcctcagcttcccaagtaactgggattacaggagcccgccaccatgcccggctaattttatttttgtatttttagtagagaaagggtttc[136 bp omitted]ctcccctccctcagccagaagctggggcatgaagaggccttcctgggtgcctgggactccagagacaggagcagttcaatcctgattgctgtgtgacctagacaagcttcctgatgtctctgggcctcctgggctgagagctgtgaccaggctggcccagttctgcgtgagggaggccccagcattctttactcaacattgtctaatccaggacttctgagttctgcaattcttctctccagagataaacagataagccagctcgcctccagggttcccgcctctgggaaggcctcacccccaccccagccaggcacctgggagccttttttttatctccgcgacggctctgccagctggtcataaaacgccctgagtgacctcgctaagtgggtgaccttggtttagtcactgaccctctgcgaagctcggtttcgtcatcgtgggggagaatagccctcccctgcaagactcctccagccctgatggctgcagagccctgggggggtgcccttaggacctcaaacttccaggcacttctggaatcccccaggcctggaagcgtgcctctccccagcgagcctgctggagcatccccctggggcccacttccttcgggatgtgcccctcccagaccccctcagatacgccacgtacccccccagattcgcacctcctcccaggttgcccatctcagggatgtcccctccccatcactggctcagatccacagggcttctcctggccccgacttccccctctgctcgcccccagcctgtcagtccccaacccccacccctgtcccctgactctctgccctggttcttcctctcggttgccacagccccagctcaggcctcctcatctccccccaacctcaccactccagccttggctgtcccaggctgctcctcccctcctcccagccatccagtgaattcctcagcgcccagccctcacccaccccgcccccccagcctcctcacctgcattccagctactctactgctttttttttttttttttttttttttttgagactgaatctggctctgtcacccaggctggagcacagtggaacgatctcggctcactgcaacctccgcctcccaggttcaggtgtattacctcatctaatcctcacagccatctgagatgaacccactttgactgctgtcatcctgtgtcagagatgaggcccagagaggttgagtaacttgcctagggtcacacagctgccaagcagggcacggccaggatttgaaccagggaagcctgactgttatcatgccctggacagggaatttagggatgatgagcaagaccaggaaggagcgagatccaggaggtagactcagcccagatgggaggtgaagcgggcgctctgaggttctagcctccgagtagctgggatgacaggcgcgtgccactgcgcccagttaatattattactattatttttttgagacggagtctcactctgtcgcccacgctggagtgcagtggcacgatctcggctcactacaacctcggcctcccaggttcaagcgattctcctgcctcagcctcccaagtagctgggattacaggcacccgccaccatgcctggctaatttttatatttttagttgagacaggatttcaccatgttggccaggctgttctcgaactcctgacctcaggtgatccacccgccttggtctcccaaagtgcagggcttacaggcgtgagccaccgtgcccggcctatctactctattactttgaattccctggccacgcttgttccctgccacagtgcctttgcttatctggctccttccatagggatcccagagacatcttctctctctctctctctctctttgcttatctggctccttgcatagggatcccagagacatcctctctctctctctctctctctctctctctctctctctcttttgagacagagccttgctctgtggctcacactggagtgcagtggcacaatctcggctcactgcaatctctgccttctggattcaagtgattctcttgcctcagcctccagagtagctgggattacaggcatgcgccaccacacccagctaatttttgtttttttttggagatggagtcttgctctgtcacccaggctggagtgcagtgatgcgaacttggctcattgcaacctccgcctcccaggttcaagcgattcttctgcctcagcctcctgagtagctgggattacaggcacactctaccatgcccggctaattttttgtattttagtagaaacggggtttca[131 bp omitted]tttcgccactttcgggactttgcgtgcaccagcgcagtgtcctttgcctgggctgacctctgccctctctccttcctttgccaaacttctcaggcgttaagattcaacacgggcaatttaggatttttggccaggggaatgagagaatgcaggcagacacccacgccaggtcccaggtccctgatcacgctggtctagcttcaaatctgccccgtggcaccaaaatattggcctgttcgtggataggaaatgaatgtaggaaatctgtgaaaaggacgtcaagaatgaatgaatgaatggaggctccattaagcaacctctgagccggagcttccaggatgagtcagggttagcagacggggaggaggggcagggagtgctgggaaagggaatggttggggcacagggacacaggtggcttcaggagagtaaggggcagctgggtcaggagagggccagctgccgtggaaactccccgtggtgggccatcctgcagcagacctgagtggctctcaaatggttcgttttttaagcacctccagggagagaaactattgttttcagaatacacgcatatgtgatttaaaaaaaaaaaaaaagttgccagctcagtggctcacacctgtaatcccagcagtttgggaggccgaggcaggtggatcccttgaggtcaggagttcaagaccagcctggccaacatggtgacaccccatctgtactaaaaataaaaaaattagccagagttgtgccacacacctgtaatctcagctactcaggaggttaaggcaggagaatcgcttgaacccaggaggcggaagttgcagtgacctgagatcctgccactgtactccagcctgggcaacagaacaagactctgtctcaaaaaaaaaaaagttgtcctaggccaggcatggtggctcctgtccattgcagtactttgggaggccaaggcaggagtatcatttgaggccaggagttcaagaccagactggacaacacagcaagaccccgtctctaaaaaaataaaataaaaaccaaacaaggaattgaccagaatttaattcaggatagcagctcaagggacgggtagatgccacaggaaggggcccagagatatcagcaagatgcatcgctcagaatgttctagtttatggggttcattatgaattatgagaaatttaatatgtgagatcgggctctgtggctcatgcctgtaatcccagcactttgggaggctgaagtgggcggatcacttgaggtcaggagttcaagaccagcctggccaacatggtaaaaccccgtctctactaaaaacacaaaaatttgccaggcgtggtggcacttgcctgtagtcccagctactggagaggctgaggcaggagagttgcttgaacccaggaggcggaggttgcagtgagctgagatcgcatactgcacaccagcttgggtgacaagattgaaactccatctcaaaaaaagaaaaaagaaatttaatatgtgttccatgtggtcttgtatgtaaaaaggacttaaaaggataataagggctaaattaaaatcgtaagaggccgggcacggtggctcacgcctgtaatcccagaactttgggaggccgaggtgggcggatcacctgaggtcgatagttggagaccaggctgaccaacatggagaaaccccgtctctactaaaaatagaaaaaagtcagccgggcatggtggtgcatgcctgtaatcccagctactcgggaggttgaggcaggagaatcgcttgaacccaggaggcggaggttgcggtgagtcgagatcgtgtcattacactccagcctgggcaacaagagtgaaactctgtctcaaaaaataattaaaattaaaaaaattaaaaaaaataaaatcgtaagaggaaaacatttggcacaggcggtaggcaggatgggctgctgacccagtaggctgacaagcccaggatgttataatccctgtaacatccttgcagttgttctcaacctgttgagtgctgtctgtattacctcatctaatccttacagccgtcggagattaacccattttaactactatcatcccctgtaagaggtgaggcccagagaggttgagtgacttgcccagggtcacacagctgccaagcagggcgtagccaggatttgaaccagggaagcctgactgtatcacgccctggatggggaacttggggatgagcaagacccggaaggagcgagatccgggagggagactcagcccagacaggaggcgttagcaggcgctctgcggttccaggcgtttccttgcattccctgcgtgctgggctacggagagtgtcaaggccagagaagccacgccggcctttggacctggggcgcctcgggcagccaaggagagctgcggtggccgctcctccccgcgctctgatctcgggagtccctggcgccggcaccttctgatctctgcctcttattgacggggagggcgaggaggggccagctctggttttacaaccccggccccaccttccttagggagggctgagccacatgaatgattttatgg[132 bp omitted]gcaacagccgcctccggggttcaagcgattctcctgcctcagcctcctgagtagctgggactacaggcgtgcgccaccacgcctggctaaatttttgtatttttagttgagacagggtttcaccatataggtcaggcttgtctcaaactcctgacctcggatgatccacccgcctcgtcctcccaaagtgctgggattacaggtgtgagccaccgcgactggcctgaagctgctttttctgagacgggctgatcaaggggtttcaaacaattaagaaataataaggcattgcctccccgctgggtgagatttgggcaggcagactagggagaggggcttcggggccagcactagcggatgcggggacttggggagaagtggaaaaagatgctcacggttccctccttctccacccagcccctgacgagggactcagccttgaagagtgagggacaggatgcgttttcctttccactcgctctttggggtggggggaggcagttgtgcctggtgggcctgtgtacggactggcagaggaaaggttggaagtggtgatgttcagagttcaggacccatttggttttgttttttgttttgttttgttttgttttgttttgttttgttttggagacagagtcttgctctgtcgcccaggctggagagcagtggcgtgattttagctcactgcaacctccgcctcctgggttcaagcgattctcctgcctcagcttcccaagtagctgggattacaggcatgtgccaccatgcctagctaatttttgtatttttgataaagacagggtttcgccatgctggccagctgagttcaggacccatttggaaagaactaagcagcccagtttgccacccagagggtctggaggaggaactgtgggacccagtgggtcacccatgacatggaataaatgccaggctgagaagggagaccctcgccttgcccggaggcctggagtggaggccctaagagaggtgtggccagttacttacgtggggaccagagccccaaggatctgggaaagtggggaccgtgacaccgcaggcaagaaagcctgcaggggccaggtgccacagctcacgcctgtaatcccaacactttgggagggcaaggcaggaggattgcttgaggccaggagttcaagaccagcctgggcaacatagcaaaccctcatctctctttaaaaaaaaaaaaaaaaaattaaaaagaaaagaagaatgcccacaggaaggcagtcctgggttcgaatgccgcccctatggctcaggagctgggaccctcctggtagaaaggactgccctcagggttgagcgtctgtgaaacgggcaatgaccggggaagggcctgacctgggctcgcagctgactcagcatttgtgctgtttctctctttcctccttccccagttctgagaccgctgctgagccagaaactcgaatgctagcaagggaggggatgggtgaggaatgataataatgatgagcttcctgagcatctgccctgagccaggccctgtgctgaaggctgtgtggggatgagctcactgagtcttcacaacagccctgtgtggtcccagtgttacaatgcccattttacagatgggaaaactgaggccccactcataaccctcatgccagagaaaggaatccaacaggggcttggaactgcagtcagaggctgcccctcagtggccatttcttctcggggggacttgtcacccttatggtttccatgaccctggccaccctccatagatatataccgtgagcccataggaaaacattttctcgtagccacctttttaaaaaaacaaaagaaacaagtgaaattaattttaatcacatatctaatctatctgaaatatcatttccacatatagtcaatttcaaaaactgtcaatgaggctgggcgtggtggctcatgcctataatcccagcactttgggaagccgagacgtgtggatcccttgaggtcaggagttcgagaccagcctggccaacatggtgaaaccccatctctagtaaatatacagaaattaggacagccgtggtggctcacatctgtaatcccagcactttgggaggccgaggtgggcctatcatttgaacccgggaggcagaggctgcagtgagctaagatcctgccattgcactccagcctgggcaacaagagcaaaactccgtctcaaaaataaaaaaaataaaaattagccaggtgtggtggtgggcgcccgtaatcccagctactcgggaggctgaggcaggaggattgtttgaacccaggagacggaggttgctgtggggctgagatcgcaccactgcactccagcctgggagacagagcaagatcttgtctcaaaaaaataaattcgggcccggtgtggtggctcatgcctgtaatcccagcattttgggaggccgagacaggcggatcacctgaggtggggagttccagaccagcctgaccaacatggagaaaccccgtcctactaaaaatagaagagtagctggtcgtggtggcacatgcctgtaatcccagctactctgcgaggctgaggcaggagactcgcttgaacccgggaggcagaggttgcagtgagccgagatcgtgccattgcactccagcctgggcaacaagagtgaaacactgtctcaaaataaataaataaatagatagataaaataaataaattaattaagataaaataaataaataataaaggtatgctggaagggagagagagaggaggtgtttgagagaaaggaggagagaaaaaaagtgaagagccccaggcgacaggcgtcgtgcagggtgcggttccacggtgtagtggagcatgcgacattcagggaacaagccaaactggacagtgagaacggaacactggcagcccagctacagtgggactcggatgggcagggcctgcggtgagactgtcaggcttcaagggacagagccagggacctcgaacctaacgtgtgttccccatcaggcagatgtgggtgagatgctctacatcccagagccccactcccctcttctccaaaatgggccttggctgggtgcagtggctcatgcctgtaatcacagcactttgggaggctgaggcaggtggatcacctgaggtcgggagttcaagaccagcctggtcaacatggcaaaaaccccatgtctactaaaaacacaataattagccgggctcattgctcacgcctgcaatcccagaactttgggaggccaaggcaggaggatcacttgagatcaggagttttgagatcagcctgaccaacatggcgaaaccctgtctctactaaaaatacaaaaattaggtcaggtgtggtggcttatgcctgtaatcccaacactttgggaggctgaggcgggcggatcacctgaggttaggagttcaaggccagcctggctaacatggtaaaaccccgtttctactaaaaatacaaaaaattagccaggcgtggtggcacatgcctgtaatcccagctactcgggtggctgaggcagaagaatcacttgaaccctggaggtggaggttgcagtgagctgagatggccattgcactccagcctgggcaacaagagcgaaactctgtctcaaaaaaaaaaaaaaattagcaaagcgtggtggtgtacacctgtaatcccagctactggggagggtgaggcaggagaattgcttgaaccccgggaggtaggggttgcagtgagccgagatcacaccattgtactgcagcctgggtgaaggagtgagactatgtctcaaaataaatacataaatagaaataaaaaatcatatgcatgtttatatggatttttattattattattttatttatagatcatagttttacttgttttgaggatatatgcaatatttatatagactttatttatttatttattttttgagacagagtctcacttcctcacccaatccagagtgcagtggcgcgatctcagctcattgcaaccactgcctcccaggttcaggcaattctcttgcctcagcctcccaagtagctgggattacaggcatgtaccaccatacccagctaatttttgtatttttagtagagatggggtttcaccat[138 bp omitted]aaaaaaaaagttaagcgggaactttccctatcagatctttttttaaaatataaaattttattaaaatagattttttgtggagacagggtcttgctatgttgcccaagctgattttgaactcccgggctcaagccattctcccgccttggcttcccaaagtggtaggattacaggggactgagccaccgcacccagcctcctatcggatcttaaaacctactttacagctactacaatgcaaatcatatgatatccactctgtgacctagcaattctgttcctagttatttgcccaagagaaatgagaacgccggttcccacaaagacaggaacaactgtggcagctttgggagtaatagcctgacctggaaaccgccgaggtgtccattaacagaggactggatcaacacattgtgaatttatttatgcagtggaattctactcagccgcaaatgggaacaagctctaatgtatacacagacacggaaaatgtcagaaacattatgctaggcaaaaacaaccaaaacaccaaagaacctcttgtgtaagatgacagttccagaacatgcaagactgggctgatgcaatctgtacggtgggggacgtagaggggtggcctctggggacagggcagggactgattgagacaagatgcaggctggggcgcaggcaccgtggctcacacttgtaatcccagcactttgggaggccgaggtgggtggatcacttgaggccaggagttcaagaccagcctgaccaacatggcgaaaccgcatctctactaaaaatacaaaaattagctgggcgtgttggcacatgcctgtaatcccagctactcgggaggctgaggcaggagaatcgtttgaacatgggaggcaaggttgcagtgagccaagttgatgccattgaactccagcctgggcaacagagacttcctctcaaaaaaaaaaaaaaacaaaagaagaggaagaagaagaagaagactgggctgaggtgggttgatcacgaagtcaggagatcgagaccatcctggccaacatggtgaatccccatctctactaaaatacacacaaaaaatgagccaagcgtggtggcaggtgcctgaagttccagctacttgggaggctgaggcaggggaatcgcttgaacccaggaggtggaggttgcagtgagccgagatagcaccactgcactccagcctggcgacagagcaagactctgtctcaaaaaataaaaataacaataaaaaataggtcgggtgcagtggctcacgcctgaaaccccagcactttgggaggccgaggcgggcggatcacgaggtccaaagatcgagaccagcctggctaacacggtgaaaccctgtctctactaaaaatacaaaaaattagctgggcgtggtggcaggtgcctgtagtcccagctacttgggaggctgaggaaggagaatcgcttgaacccaggaggcaaggttgcagtgagccgagatcacaccactgcactccagcctgggcaacagagcgagactccgtctcaaaaaaaaaaaaaaaaaaaaaaaagaaagaaaaaaagaggaacttacaagaacaatggaaagattaccccatgaacacccctatgcccaccaccactaaaatttggggttttttaaatttttaaaatttttttcttttttacagtgtccctttcaggatacacttaaattttattatatagtacttgttttatcacagatctttgcatccctctagccatctatcaatccttctgggtttgttgttgttgttgttttgagatggggtttcactctgttgcccaggctacagtgcaatggcttgatcttggctcactgcaacctctgccccccaggttcaagcgattcttctgcctcagcctcccgagtagctgggactacaggtgcgtgccaccacgcccggctaatttttgtatttttagtacagattgtgtttcactatattggtcaggctggtcttgaatgcctggactgatgatacacctgcctcagcctcccaaagtgctgggattacaggaataagccactgagcccagcctaatttttgttttttttagtagagacagggtttcgccatgttagacgggctggtctcaaacacctgacctcagatgacccgcctccgtaggcctcccaaagagctgggattacaggcatgagtcacggtgcccggcctaatccttacttttgatgcatttcaaagtaagttacagacatctgaatgtttcaccctaaacattccaggctgcatattattaactacttcagtatttgtttatgggggggtgtgtgtgtgtgtgtttgtgtgtatgtgtgagagagagagacagagagatggagagagagagagatggaatctccctctgtcacctaggctgaagtgcaatggctagatcttggctcactgcaacctccacctcccagattcaagcgattctcctgcctcagcctcccgagtagctgggattacaggtgtgcaccactacgcccggctaatttttgtatttttagtagagatggggtttcaccatgttggccaggctagtctcaaactcctgacctctggtgatctgcctgcctcggccttccaaagtgctgagattacagatgtgagccactgcacctagctagtggttttgtttgtttgtttgttttaatagaagtttacctacagtaaaccacacaaatctaaagtgtgctagttttttgtttgtttgtttgtttgtttttgagacaggatcttgccctgtcacctaagtggtacaaccacagttcactgaagcctcgacctccccagctcaggcaatccttccacctcagcctcccaagtagctgagaagacaggcacatgccaccacaccaggctattttttttttttttagacggagtctcactctgttacccaggctggagtgcaatggcatggtcttggctcactgcaacctccgcctcctgggttcaagtgattctcccacctcagcctcccaagtagctgggactacaggcgcacaccaccacacccagctattttcgtatttttagtagagacggggtttcactctgttggccaggctggtctcaaactcctggtgtcgaactcctgacctggtgatctgcctgccttggcctcccaaagtgctgggttacaggtgtgagccaccgcacctagcctaaatattttattgttatttgtagagacggagtctcactatgttgtctaggctggtctcaaactcctaggctcaagtgatcttcccactttgcttcccattttgggaggatttgggctcccaaaatgctgggatcacaggcacgagccaccgcacccaggctaaagtgtgctcattttgagaaatatatgtacggctgggcacaatggctcatgcctgtaaagccagcactttgggaggccaaggctggtgggttgcttgaggccaggagttcgagaccatcctggccaaaatggcaaaaccccatcattactaaaaatacaaaaattcgagggatgtgccaggcgtggtggctcacacctgtaattctagcattttgggagactgaggcgggtggattgcttgagctcgggagttccagaccagcctgggcaacatggtaaaaccccgtttttactaaaatataaaaaattagctgggcgtggcagtgtgctcctgtaatcccagctagtcaggaggctgagatgggagaatcacttgaacccgggaggcagaggttgcagtgagccaaaattgtgtcactgcactccggctttggtgacacagtgagactctgtcaaaaaaaaaaaaaattagagggacgtgttggcacacacctgtaatcccagcttcttgggaagttgagacatgagaatcacttgaacctgggaggtgctagttgcagtgagccgtgattgtgtcactgcactccaacctgggcgatagagcaagactctgttttaaaaaaaaagagagggagagggagagatgcagagatgcatgtataacccaagtccctgtcaagatgtaaactccttttgagtggctgaattccagcgtttttccaggtccagactcatttaccccgtcccctgttgtttctggcctctcttggaacatcattgccatgatcgccctgggatatatttcactgcgcgcttcctcaagggcatctgtctattccttatgtttctagggggtcaggttcattcggggatctggcaaatagaacacagtatttaaccaggcacggtggctcacacttgtaatcccagcactttgggaggctgaggcgggcagatcacgaggtcaggagtttgagaccagcctgaccaacatggagaaatcccgtctctactaaaaatacaaaaattagccaggcgtggtggtgcacgcctgtaatctcagctactcaggagtctgaggca[131 bp omitted]gaaggtaggaaggacatagcacagggaaaaattctgccacttcccagctctcctgctagtgaggaaggcagatttaaagaaggcaacagaccaggtgcggtggctcacgcctgtaaccccagcactctgggaggctgaagtgggagggtcgcttgagctgaggagttcaagaccaacctgagcaatgtggtgagactctatctctacaaaaaatgtaaacattagccaggtgtggtggtgtatgcctgtagtcccagctactcaggaggctaggctgaggcaggaaaatcacttgagcctaggagactgaggctgcagtaagctgtgaccgcatcactgcactccagcctgagcaacagagcaaggccctgtatccaaaaaataaaaataagcagggcacggtggcttatgcctgtaatcccagcactttgggaggccaaggcaggagaatcccacgagcccaggagttcaagaccagtctgggcaacatagcgagacccctgtctctacaaaaaatttaagaattagctgagtgtggtggcacacacctgtagtcccagctactggggaaactgaggtgggaggatcgtttgagcccaggagccggagggtggaggtcgagggtgcagtgagccaagatcaagccactgcattccagcctgtgcaacagagtgagactccatctcaaaaaaaaaaaaaaaaagtattaaaaagggccgcaaaggaggccagcaggatgcggagatgggcagtaatgtgcacggggtgggaggtctcttgctttagccaaggtggtcagggaagacccaagccctgaagacagagaaggagctggccttgaatcctgtaaatgttcccaaacgatctccctaagaggttatgccagtcacactcctgccaagagagtatctctgcgccacggccaagggtgagtcatcctgctgagaggttgagctggggacgcctgcccagatgggctccaagtgagggagagcctggcggggagaacagcccggacagaggcagggcagggcgccgggacactgcttggcgcgtcctgggagtgaagcgcattgaacccagctcaggctggtggtgggggagtcttggcaatgctctctctccaaaggcgagttgatcacagacgctggcagtgagtcagcggcaccgccagggctgctgagaaatccctcctgctgtccgatcgcattcctggaagggtgggccgctcagggccccccagctccagtcccactcaggccccagaatcccagcagcccaccactcacttctttgcgctcactcttccttctggtccccacacaccgctccctctctcgctaccttcagtctttgctcagatgtcgagttcccagaggggcctccctgacgccaccgttctagcagcatttagcatttagataaatgacaaattttagattaaatgttagataaattttaggctgggcgtggtggctcacgcctgtaatcccagcactttaggaggctgaggcaggcagatcacaaggtcaggagatcgagaccatcctgggtaacatggtgaaaccctgtctctactaaaaatacaaaaaattagcagggcgtggtggcgggcgcctgtagtcccagctactcaggaggc[136 bp omitted]atatatatatatatatatatatgataaattttagataaatttttatctaaaattgtaactcactggattcagtgacatctatctgtaatcccagcactttaggaggctgaggtgggaggatcgcttgagcccaggagttttctttcttttttttcttattttttaaagagattgggttctcactctgtgtagcccaggctggtcttgaactcctggcctcaagcagtcctcccatctaggcctcccaaagtgttgggattacaggcatgagccaccatgcctggcctcaagattggttttttgttctgagacacagactcactctgtcacccaggctggagtgcagtgacatgatcccagctcaccatgacctccgcctcccaggttaaagtgattctcctgcctcaggctcctgagtagctgggattataagcatgcgccaccacgcctggctaattttgtatttttagtagagatggggtttcgccatgttgccgaggctggtctcaaactcctgatgtcaagtgatccacctgtctcggcttcctaaagtgctgggattagaggcatgagccacctcgtcaagattgttaatcacatctgcaaagtccgtttggccatttgtggaacacagtctcagatttcaaggattaggacgacaacatcattggaggctgtgatttggccaaccacagtcacagagatggaattacacagagtttaccttccaagtctggctctttcactcagtgcaatgcctgggagagccttccctgtggctgtgggaaccgccggtttgttctttttttttttttttctgaggcggagtttcactcttgttgcccaggctggagtgcaatggcgcgatctgggctcactgcaacctccacctcccaggttcaagtgattctcctgcctcagcctcccaaaaagctgggattacaggcgtgcaccaccatacccagctaatttttgtattttattagagacggggtttcgccatgttggccaggctggtctcaaactcctgacctcaggtgatttgcctgcgtcagcctcccaaagtactgggattacaggcgtgagccaccgagcccggccagttctttttcatcgctgagtagtatcgcatggcacagaatactgctgtttatccacttacccatgcaaggacgtttgagctgttcccagggtttggcaattatgagtacagtggctataaacatgagtgtagatgagggtcaagtgtagatgttggtttgaacatataggcttccatttctcttggacaaacacccagaagggagagtgactctggtttttgctggtttttgttttccgtttttgtttttgttttttttttctgagacagagtctcactctgttccccaggctggagtgcagtggcgcgatctcggctcactgcaacctctgcctcccaggttcaagattctcctgcctg[168 bp omitted]gccaccacacctggcctattattatttttagagatgaggtcttgctttgtcacccaggctggagcacgcagtggtgagatcatagctccctgtagccttgaactctgggctcaagtgatcttcccacctcagcttcctgagcagctgtgactacaggtacaggccaccatgcctggctaatttatttatttatttatttatttattttgagatggagtttcgctctgtccccaggctggagtgcagtgatgtgatctcaggacactgcaacctctgcctcccgggttcaagcgattctcctgcctcagcctcccgagtagctgagattacaggcgcccaccaccgtgcccagctaatttttgtatttttagtagagatggggtttcaccatgttggccaggctggtcttgaactcctgacctcaggtgatccgcccacctcagcctcccaaagtgctgggattacaggcttgagccacagtgcccagcctgcccaggctggtcttgaattcctggcttcaagcgatcctcctgcctgggtccttcaataaatattgacaagcacctccctgctgccaggctctgctgagagtactttaggtacattggcaaacaagacagaacaataacaaaagaaaaaaacaccagatttttttaaattcccaggctcatggagcttacatgcaagcggagaagatggtcaataaaccatcaatgtcatatgtcaactgtagagtagctcaggagtgagtgacaggtgtgatggtaggcagagcaggggaagagggtgcagggggtctagctgtaaacaggatgctgtagggtagccctcatgataaggggtgacatttggaacaaagacttgaaaaaggtgaggacaagaggcatgaggcaccatgcccggctgcacttgtgtttaatgaaaactatgatggctgctgtgtgaccttaggggactatattaacctctctgggcctccatttcttggagcatgaagtggtcctttcactactcacttcctgaggttctgggagaagtctaggatcatgcatgttcttggcatagagtttctgtacgggtggctcccctcctggtgccaggccctttcctgggattggagggggatggacagagggaattcagaggtttaaggaggctgtggccccatctcctggggcaaggaggctattggtct[132 bp omitted]aaacctcgtctctactaaaaatacaaaaattagccaggcatggtggcatgcacctgtagtgctagctactagggaggctgaggcaggagaatagcttgaacccaggaaggcggaggttgcagtgagctgagatcacaccactacactatagcctgggcaacagagcaagactccatctcaaaaaaaattaaaaaaaagagggtgatatctgacctgtgtcgaggtggaaggaggagatgggaaaggcactcagagagtggaaaatgggcgtgcctggagctggtgtctgcagcaaggaggccagaggaggaggcactggcctaggctttgacctgagggcactgaggtgccacaggagggctgggagcagaggaggggcagcggagaagacctggaggaggctgagtcgagggcccacagggagaggagaaggcctgaggtgggcaggaatgcagggacagagaaggaaccaggacccagtagtccatggaggagggaggcaggagggctgggaagttgggcctttaagagttgcatgtctgctgggcacggtggctcatgcctggaattccagcactttgggaggctgaggcaggcagatcacctgaggtcaggagtttgagaccagcctggccaacatggtgaaaccctatgtctactaaaaatacaaaaatcagttgggcgtgacgacaggcacctgtagtcccagctaatcaggagtctgaggcaggagaatcgcttgaacttggaaggcggaggttgcagtgagccgagatcgtgtcactgtactccagcctggtgacagagcaggactccatctcaaaaaaaaaaaaaaaaaaatttacatgtccagggggcttgcaggcagaaccattcaccctccaggaggctgagtcattcccggggatcacctgcctgctgtggccacccacccggaggagctctgtctgctgtccctgtccctggcctctcgctggcttaattgtccctttcattcctccactcaaatcgagcgatatcagcacgccaggccctggacgtgttttgtgggaacaaacaggcctgtttgtctacgtcccaggcgtagagaagttcgtcccggggccagatttgttttacaaggtggacagcaggcacagggtacctgttttaggaatgcgagaatgcagccacgtaggcatgtgggtgggggacaggggggtcctggctctgcgctcaggcccagagagtggcagggtcgggggacatttccaggagcgggaacagcagctccaggggcccagaggtaggactactgctcggtgcatttggaggtcttggctggactgtggcgttcatggggaaggagggactgagtctacagggctgagaggccaccacagcttgggttcaaatcccagctctgttcagctcttgtgtggccacagtcaaatcgcttccctccttgaagctccatgtcctctctgtagcaatggaagctacagcggagcccaattctaccccacccactgcacgacaattggtttgtttctatgtttgttactagagtcagggtctcactctgtcacccaggctggagtgcagtggcgcaatctcagctcactgcagcctcaaactcctggctcaattgatcctcccgcctcagactcccaagtagctgggactacacgtgtatgctaccacagtcggctaattttttatttttaaacagagacagtgttctcgctatgttgctcatgctggtctcgaactcctggcctcaagtaatcctcctgtcttggcctcccaaagtgctgggactacaggtgcaagccactgcgcccagcccttgaggagttttcaaagtatccacagcacccaaggctgagaactgctacagcagctgaaagccataagtgtctttgactttccttttgtcctggtaaaccccttcattccttccttccttccttcctacactcattcaatcaaacactggttgaacaccaacaagtcccagcactgtgggctccaccctggcctctggggagtgggggagggacccccgatttggagattgtaggtgccaagaggaacgggcaagatgccctcctattcattcatttattccttcagggcctctccaagggcacagggtcttttcttgttggcatctgggttttcctctcctgtaagctgggaaggagatttctccctcaaggagctgttggccagatcaaagactaaaataatgctaaacagagcttccgtttcctgataaatgtatcaggagccaagcacttaaaatatattatcccgttgaatccccaagtaggattaaaacctcaaagcagagattgctcttatcctcacatgacagatgaggaaactgaggatcaaagaagtgaagtccgctgcccaaggcacagaaaggacaagtaggacctatggaagcccagccaaggcccagcaggcgctcagtggctaatcctcctgaaaactaattacctcactgcgcctgcccactggactaaatttgcctggtaaccgatgacatcatcactaattccgcgcccacgctcaacctatgggataactgatgacatcactgaacaaacaaagtaactgcagtttattgaaggcctactgtgtgcgcaaggctgtgctaggcaggcctcctctgagttcacataaggccccgtggtgcctgctactgcatgaaatagccataataattt[146 bp omitted]tcttggattcaagcaattatcctgcctcagcctcccgagtagctgggattgcaggtgcccaccaccacacctggctaatttttgtttttgtttttgagatgaagtctcactctgttgcccaagctggagtgcagtggcgcgatctcagctcactgaaacctccacctcctgacctcgtgatccacccgccttgacctcccaaagtgctgggacaacaggtgtgagccaccgcgcctgggatctttattaactttttaaaattaaaaatatatatatatatatatttatatatattttgagatggagtttcactcttgtcgcccaaactggagtgcaatggtgccgtgatctcggctcactgcaacctccgcctcctgggttcaaacgattctcctgcctcagcctccggagtaactgggagtacaggcatgcgccaccacgcctggctgatttttgtctttttagtaggggcggggtttcaccatgttggccaggctggtctcaaactcctgacctcaggtgatccacccacctctgtctcccaaagtgctgggattacaggagtgtgccactgcgcctgaccagctttataaagtttatagggacagtgtcaccactttacagaagagggactgaggctctgaggaggaagttccttgccagggtccgagtgtcgccaccctgagaactccagcacccacctccctactctccctcatggcgtctcccccacctttccacagccagaagttgccaggtgaatacttccggtacaagggcgtccccttccccgtcggcctgtactcgctcgagagcatcagcttggcggagaacacccaagatgtgcgggacgacgacatctttatcatcacctaccccaagtcaggtacctgccgggctgcgggcgtcgggggctggggagagtggggagggggtgcggcagaggacaggaaaggcacatagagaaggaggggaggaggaaaagtggggccgggtctgttcagagcggtgcccctgccagaagtagcctcccagggatacccacccggtgcccagcctctcccctccaggtcagttctcaacacttcaccttccctgacctccctggctgaaatagcgtcctcgttctgttcctccctttcccctttaccctctacttctcttttttttttttttttttgtagagatggggtctcgctac[132 bp omitted]tctgtcactcaggctggggtgcagtggtgcaatatcagctcatcaaacctcccaccttggcctcccaaagtgctgggactacaggtgctggtcaccaccaaattgtatactttttttttttttttttttttggaggtcttgctctgctgcccaggcttcagtgtgatggtacaatctcggctcatttcagccttgacctcctggactcacatgatccgcccaacctcagcctcctgagtagctggaaccacacgtgtgcaccaccatgcctggctaacttttgtgttttttgtagggacagggtttcatcatgttgcccaggctggtcttgaactcctgggctcaagcgatcttcctgcctcagcctcccaaagtgctgggattacaggcatgagccaccgcgcctggctaaattgtatactttaaagtggtgaattacacacaatttgagtgtttgagtttgagaccaacctgggcaaaatggcaaacccccctctatttttttttttttttttttttttttgtgacggagtctctctgtcgcccaggctggagtatagtggcatgatctcagctcactgtaacctctgcctcctgggttcaagcaattctctgcctcagcctcctgagtagctgggatcacaggtgcccgccaccatgcgcggctacttctttttattttattttattttatttttgtatttttagtagagacagggtttcaccatcttggccaggctggtcttgaactcctgacctcatgatccaccagccttggcctcccaaagtgttgggattacaggtgtgagccactgagccgtcttttttttttttttttttttttttttttttagagacagagtcttgctctgttgcccgggctggagtgcagtggcgtgatctcggctcactgcaatctctgcctcctgggttcaagcgattctcctgcctcagcctcctgagtagctgggattacaggcgtgtgccactacacccagctaatttttgtatttttagtagagatgaggtttcaccgtactggccaggatggtcttgatctcttgacctcttgatctgcccacctcggcctcccaaagtgctgcgattacaggtgtgagcccggtcaataagtagcatttaaatgaccaaagggaaataacaaaaactcttccttcccttttttctcctctcttccccacctcctccaacaagtatttattaaacacatattatgtgccaggcagtgttctaagtacaaagaaggctgcaactctccagacagactgaaatgtctccctttatggagctcacattgtactggggcaacccagaaaataaatcaacaaataaaaatatgacactatgattggtggcaataaatgctgtgaagaaaagtagagggtaggcggggcatagtggctcatgcctgtaatctcagcactttgggaggctgaagtaggaggatcacttgaggccaagagttcaagcccagcctgggcaacatagcaagaccccatctctaaaaaaaaaaaattagccaggcgtggtggtgtgcgcctgtagtcccagccacttgggaggctgaggcaggaggatcactttagctagagaggtcgaggctccagtgagctgcgatcacaccactgcacttcagcctgggcaacagagtgagaccctgtctcaacaaatagaaaaaggtacaattcaatgactttgccatgtgcgtggagctggtcatccatcaccacaatcaattttagaatattttcagccgagcacagtggctcacacccataatcccaacattttgggaggccgaggcaggaggatctcttgagcctaggcgttcgagagcagcctggccaacatggtgagacctcatctctacaaaacatacaaaaattagccaggcacgatagtgtatgcctgtagttccagctacttgggaggctgagatgcgaggattgcttcagtctgggaggtggaggttgcagtgagacgcgttcaccccaccgcactccagcttgggtggcagagactgtctcaaaaacaaaaaactgagtgggccaggcacggtggctcatgcctgcaatcccagcagtttgggaggctgaggcgggtggatcatttgaggtcaggagttcgagaccagtctggccaacatggtgaaaccccgtgtctactaaaaatgcaaaaactatccaggcgtggtggtgcgtgcctgtaatcccagtattcggcaggctgaggcaggagaattgcttggaaccggggggtagaggttgcagtgagccaagagtgcaccactgaactccagccttggcgatagggcaagaccctgtctcaaaaaccaaaaacaaataaaaataaaaataaagaacattatcatcatccaacaagaaactctggacctataagccatcacctcccaatcctcatatcccctcccccctgggccctggtaaccaccaatctccgttctgtttctatggatttttctattttgggcatttcatggaaatggaatctacactatgtggcctcttgtgtctggtttcttcctgagcatcacgttgtcaaggttcaaccacattgtagcatgtgtcagagtctcattcatttttatggtccaataatattttatgttatgtataaactatattttatttattcatcagttgataagcatttggattatttccactctggggcttattatgaatgaa[138 bp omitted]gcctc[134 bp omitted]ggcctcccaaagtgctgggattacaggcacgagccaccgcgcccggcctttttcttttcttttctttctttcttttttttttttttttttgagacgaagtctcgctcttgtcccccaggctggaatgcaatggcgcagtctcggctcactgcaacctctgcctcctaggttcaagcgattctcctgcctc[134 bp omitted]cagcttcccgaagtgctgggattacaggcgtgagccactgctctcggccttgcatgcaagttcttgtttctatttttattttttgaggcagggtctcgatctttcgctcaggctggagtgcagtggtgcagtctcagctcactgcagccttgacctcctgggctcaagctatcctcccacctgagcctcctgagtagctgggacgacaagtgcacaccaccacgcccagctaattaaaaaaactttttttttttttcacagacgagatctcactgtgttgcccagactggtttcaaactcccgagctcaagcaattctccctccttggcctcccaaagtgttaggattataggagtgagcctctgcactgggccctgcacacaagttcttacgtggacatatgttttctttgttttttatggagacaggttctcactgttgcccaggctggagtgcagtggcgagatctctgttcactgcaacctctgcctccacaggttcaaacaattctcctgcctc[134 bp omitted]cagcctcccaaagtgctgggattataggcgtgagccaccgtgccagcccgaagtggctttatcttttttcattcttcccagcaatagatgatcctctattgccccacatcttctccagtgattagcatcaacagagatttacttattggagacaaggtcttgctcggttgcccaggctgaagtgtagtgggaagatcatggctcactgcaacctcgaactcctgggcacaagtgatgctcccaccccagcctccctaatagccaccacacccagctaatttttgtagcgataagggtctctggttggtctcgaatgcctgggctcaagcgatcttcctgcctcagcctcccaaagtgctgggattacaggcatgagccactgtgcctggccagtttttttctaaagctattttgataggtgcctactggtgtttcactgtagtattaatttgcatttccctaacagctaatggtgtttgagcatcttttcatgtgctcattagccatcatatatattccttttttttttttttttttttttttgagatggagtttcactcttatttcccaggctggagtgcaatggcgcgatctcagctcactgtaacctccacctcccaggttcaagtgattctcctgcctcagcctccctagtagctgggattacaggcatgtgccaccatgcctggtttttgcattttttttttttttttagtagatcgggggtttctc[131 bp omitted]gccactgacttgaagctcacaaatgtattatttggtaaagtgttgaaat[137 bp omitted]ccattctcctgcctc[223 bp omitted]tacttgttttgcaaatattttctcccaatctatggcttgtcttttcattttcatatcagcgtcttctcagagtatgttttattattattattatattattattattattattattattattattagagatgaagtctcgctctgtcgcccaggctggagtgtagtggtgccatcttggcttactgcaacctccgcctcctgggttcaagcgattctcctgcctcaacctcccgagtagctgggattacaggtgcccgccaccatgcctggctaatttttgaattattagtagagacggggttttgccatgtgggccaggctggtctcgaacccctgacctcaggagatccacctgcctcggcctcccaaagtgcagggattacaggcgtgagccactgtgaccagccttgattttgcttatgtttttctttctccttataccttgacattgtcccatcttggaactttaaacaaataagtttctggtttttttaaatagttccgtggtatttcataacataggatatacaataattcttgcttaaccagtttcctagtgactgatattaatgttcaatcttttgcctatgtatatacaatgtaaactttaaacacaatgccttgtacatgcagtacttggcattgaacacacttacctctaggacaaatatctggacaaagaattgcttggtcagagtctgtacatttgtaattttgatatgtaatggctacatttccctctatagaaattgtggaagcttgttctctgagccgggggtgtggttaacacctgaaatcccagcactttgggaggtcgaggcaggcggatcacttgaggccagcaataggagaccagactggcctacatgaccccatatctactaaaaatacaaaaattagctgggcatggtggtgcgcgcctgtggtcccaactactcggaaggctgaggcatgagaattgcttgaactggggaggcagaggttgtagtgagccaagatcgtaccaatgcactccagtctgggcaacagagcgagaccctgtctcaaaataaaatgaaaaaagaattatttgcagtcaggcacggtggctcatgcctgtaatcccagcactttgggaggccaaggcaagtggatagcttaagcccaggagttcaagaccagcctgggcaacatggcaaaatcctatctctacaaaaaaaaaaaattagccaggcgtggtcgtgcatgcctgtagtcccagctacttgggaggctgaggcaggagaatcgcttgaaccctggaggtggaggttgcagtgagccgagatcactccattgcactccagcctaggcaacaagagcaaaactctgtctcaaaaataaaaaataaaagaaaaaacagaagaaaataccaagtgtggcaaggatgttgagaaaatggggcccttgtgcactgttggtgagcatgtagaatggtacagctgctatggaaaacagtttggcagttcctcaaaaaattaaagatagaattaccatattaactcagcagttccacttccaggaatatgcccaaaagaactaaatactaggtgggggcactctgacagatatttgtacaccaatgttcatagccacattatttgcaatgaccaaaagctgaaactatccaaatatctgccgttcatgaatgaatggataaacaaattatgctatattcatacaatggaatattattcagctgtaaaaaggaaggaaattcgtccgggtgcagtggctcatgcctgtaatcccagcactctgggaggccgaggcgggcggatcacctgaggtcaggagttcaagaccagcctggccaaaatggccaaaccccgtctctactaaaaatacaaaaattagccgggcctggtggtgcgcgcctgtagtcccagctgcttgggaagctgagg[132 bp omitted]tgtaatcccagcactttgggaggctgaggcaggcagatcacgaggtgaagagattgagatcatcctgaccaacatggtgaaaccctgtctctactaaaaatacaaaaattagctgggcatgctggcgtgcgcctgtagtcacagctattcgggaagctgaggcaggagaatcacttgaacccgggaggtggaggttgcagtgagctgagatcgcgccactgcactccagcctggaaacacagcaagactccgtctcaaacaaacaaaaaacaccacacacaggaatagctaaaatagggtgcagccacttcctctagggctgaagccaaactcccaagaaagaaagaaattgggaagaaggacttccctgcccaaccggctccccacacaagattagagtttcgctgcagaggtatggtcatgacccactgggtgactgagaagttcactgaagtgcaacaggccactgaaatttgctagggggaggggtaaacgtcactgcgtgtctagtgcagggctggcccctgtccatcacaagatcccgctaagaggagctcgtgagaatcaggaagagccccatcctcattcagtgttcctccagcgccctctgctgacaaggtttaacactgagctagctggcagaggagaaatgtttacagggtccagctccaatatcacaaaaacggcagagaggcatgaagttggagccaccagcctgtaaactgataactggtacaaggtggttgttagaatgaaatccagtgaatggattggatgtggtggcttacgcctgtaatcccagcactttgggaggccaaggcaggaggatcgctagaggccaggagctccagaccagcctgggcaacacagtgagaccccatctctacaaaaattttaaaaattaggtgggcgcaggctgggcatggtggctcatgcctataatcccagcactttgggaggccaaggcaggtggatcacctgaggtcaggagtttgagaccaacctggccaacatggcaaaaccccatctctactaaaaatacaaaaactagccaggcgtggtggcacacttctagtcccagctacttgggaggctgaggcaggagaattgcttgaatccaggaggcagaggtttcagtgagccgagatagagccactgcactccagcctgggcaacagagtgagactccttctcaaaaaaaaaaaaaaaaaaaaaaaagctgggtacatgtggtctagctactccagaggctgaggtgggaggatcacttgagcctgggagttggaggctgaagctgaagtaagctgtgactgcaacagtgcacaccagcccaggtcacagagcggaatcctgtctcaaaaagaattaaatgcaatgaatactaacagaaagtaattttgaacgtaattgtttctcttctgaacagcctgtggtctcctgaaattcaaaactgtgaattgggtccttgatgaggtccctttccactaggtaacattctgtggctccccacagaaataaagaggtgaacctcagccgggcgcagtggcttactcctgtaatcccagcactttgggaggctgaggcaggtggatcactggaggtcaagagttcgagaccagcctggctaacatggtgaaatcccatctctactaaaaataccaaaaattagccaggcgtggtggtgcatgcctgtaaccccagctactagggaggctgaggcaggagaatcacttgaaaccgggaggcggaggttgcagtgagccaagatcgcgccattgcactccagcttgggcaacaagagcaaaactccgtctcaaaaagaaaaaaagtgggggtaggggggagggatagcattaggagatatacctaatgttaaatgatgagttaatgggtgcagcacaccaacatggcacatgtatacatatgtaactaacctgcacgttgtgcacatgtaccctaaaacttaaagtataataaaaaaaggggtgaccctcaaaagtgggcagtgaaaagtgaaaagagcagagatttttatgtccagacacctgggttcaattccagctttctccatgtattaaaggagtgcctgctgggcatgatgcctctgctcccagcaccttgggaggctgaggcaggaggattgcttgagcccaggagttcaagaccagcctgggcaacatagtgggaccgtatgtcttctaaaaataaaaataagaaattagccaggtgtggttgtgtgcacctgtggtctcagctactcgggaggctgaggcaggaggatctcttaagcccgggatttcaaggctgcagtgagctgtgatcacaccactgcactccagcctgggtgacagagcaagattctgtccccaaaaaaataaataagtaaagcaattctggctgtactaatagatcagcctcagaatttcagcggctgaagccaagtttgtttctttttcctataaactgtagttggtgcaggaagggtggaaggaagttggtggggggatatccatgcattcccagacatttggttccttccatcttatggctctgccatccccgggagtcccagattctcccctggagtctctgtatccagaagcagagagggagtggagagtcacgtggcgtgcgtttatgggccaggcctggaaatagccgcacatcacatcgccgccacctatacttccttggccagacccagtctcttggccccacacatagcagcaggggagaagagaaaaggtcatcacgccatattcccagcagaaaaatgaaatggggttgggtggacagctcaccagtctctgccctgcaccactttcctagctttgtccccttggacgagcgacatggtttctgtaaggctcagtttctggctccgaaaatgaggttaagcaaccttgccttctctgccagctgtaaggaatcagtgtgataaaataggtggtaaattgctcaataaatgctgtcaggcagggcgtggtggctcacagctgtaatcccagcagtttgggaggccgaggtgggcagagcacctgaggtcaggagttcgagaccagcctggccaacatggggagacctcgtctctactaaaaatacaaaattagccaggcgtggtggtgggcgcttgtaatgctagctactcggctgaggctgaggcaggagaattgcttgagcctgggaggtggaggttgcagtgagccgagatcgcgccattgcactccagcgtgggcaacagagtaagactctgtcttaaaaaaaaataataaaaggtggcaaattgctcaataagtgctgttgtgattattctgatgatatctccctcttcagccctcccacacccaattaatctgctcgatttctcccaacaggcacgacctggatgatcgagatcatctgcttaatcctgaaggaaggggatccatcctggatccgctccgtgcccatctgggagcgggcaccctggtgtgagaccattgtgggtgccttcagcctcccggaccagtacagcccccgcctcatgagctcccatcttcccatccagatcttcaccaaggccttcttcagctccaaggccaaggttgggaggaggggtgtgtgtcagttgggaggggctgcatgggtgtatggggtaatggggggacggagcataactcattgattcattcagcacctatttgttaaacacctactatgtgcctgactctgatctagcacagtggtcaatatacacacagaaatgcctgccctttggcagggagtgatggctcatgcctgtagtcccagcactttgggaggctgaggcgggaggatcactttgggccaggagtttgagaccagcttgggcaacatagtcagaccacatcattacaagaaattttaaaaatcagtcagacgtggtggcacacacttgtagtcccagctacttggaatgctgaggtgggaggatcacttgagcccagcaggtcaaggctgc[191 bp omitted]catggtgaaaccatgtctctactaaaaatacaaaaattagtcggatctggtggtgggtgcctgtaatcccagctactcaggaggctaaggcaggagaattgctggaacctgggaggtggaggttgcagtgagctgagatggcaccactgcactccagcctgggagacagaccaagatttcatctcaaaaaaaaaaaaaaaaattacagccaggcgcagtggctcacgtttgtactcccagcactttgggaagccaaggtgggcagatcacctgaggtcaggagtttgagaccatcctgaccaacatggagaaaacctgtctctactaaaaatacaaagttagctgggcgtggtggcacatgcctgtaatcccagctacttgggaggctgaggcaggagaatcgcttgaacccaggaggcggaggttgtggtgagccgagatcgcgccattgcactccagcctgggcaacaaaagcaaaactccgtctcaaaaaaaaaacccccatatattatactacatattataataatttaatagtattacaatatactttaattatatttaatatttatatgtttaacatataataacataatgcaatataatataatacataaaatgtctgatgggataaatttacattggggggagagggctggagatagagttagaggtgggtgtggggctgcaattataaataaggaggtcaagggggcccccagtgagtaaaaacccgggaggtgatggtgggagccacagaggtttctagaggaagagcatttcaggcaagagggaaaagcaggtgcaaaggccctgaggtgggtgtatctgaggtgcaagagggaggtcggtgtggccggagccaagtgagcaagtggggaaaggagtggagatgaggtccgggtggggaggcaacaggggccaaaatgtgcagggccgcgtgggcccggtgcggacttgagctctgaccgagtgacgaggcagcgcggcagggatcgcagcagaggaggagcccgagcgggcttaggcttcaccggcgccctctggcggtcagatggggaccgactgtcgagagagcagaagccgggaagcccgagaggcggcgctggccggggtccaggggaggggacggtggctggactagggtgatggtcacggaggtattttgaaggtgagaccgggaggatttgctgacagactggatgtgggtgtgagagaaggggatgagtcaagggtgactccaaggtttcggcggaagcaactgtcagggtggggcaactgggaaggggaggagggaggggagcaggcgggggaggaagacacgggctctgcggcggcccatcccacgtccagcagaggctgccggtgggcacagaaatgcacccatcgggatctgaggggagagacttgggctgacacgtccatttgcaattccttggcacatatattctgtaattaatcgaagctccaggactgggtgatatcgccaaggaattgagcgtggacagagcagagagggggggctgcaatcaggaagtccccaagaccaccctcaggctcaacgacttagcaaaactcatagtgttcagcaaagctgctggactcccgggttatagtcaattacaatgaaagcaaacgtgaaaatcaggcaagggggccgggcgcggtggctcacgcctgaaatcccagcactttcagaggccaaggtgagcagttgattgagcccaggagttcaagaccagctgggcaacttagaaacacccatctctacaaaaaagtttaaaaattcgtcacgtgtagtggcatacacctgtagtcccagctacttgggaggctgaggtaggaagatcacttgagcctgggagtttcaggctgcagtgagccatgattgtgccacaggcactccagcctcaaggacagaacaagaccttgtttcttttcttttttctttttctttcttttttctttttttgagacagagtttccctcttgttgcccaggctggagtgcaatggcacgatcttggctcactgcaacctctgcccctctgcctccagggttcaagcgattctcttgcctcagcctcccaaatagctgggattacaggcgcccaccaccatgcccagctaattttttgtattttcagtagagacggggtttcaccatgttgaccaggctggtctcgaacacctgacctcaggtgatccacccgccttagcctcccaaagtgttgggattacaggtgtgagccacagtgcctggccgacaagaccttgtttctaaaaaataagactaggctgggcatggtggctcatgcctgtaatcccagcacttggggaggccgaagcagatggatcacttgaggccgggagtttgagaccagcctggccaacatggtgaaaacccgtctctactaaaaatacaaaaattagccaggcatggtggcacccacctgtagtcccagctactcgggaggctgaggcaggagaattgcttgaacctgggaggcagaggttgcagtgagctgagatcgtgccactgcactccagcctgggagacacagcgagacttcgtctaaaacaaaacaaaacaaaacaaaaaaatccaagggattaggaaatacctctcaggacctaggggcaagggccaggcctttctctgggcagaaaggaatcctctacagcacaggaatcaggaaggagccctggaaagcaccaatgttattacaagacctcacaccagcagccacgtttctctaagtctgttttcatttagtttttggtggatctgggggtgttttgttttgttttttggtttatttgtttttgaggcagggtctcgttctgtcatgtaggctggagtgcagtggtgtgatcacagctcactgcagcctcgacctcccgggctcaagtgatcctcctgccttagcctcccgagtagctgggaccacgggcacgcaccaccacatcagctaatttttgtattctttgtagaatgggggtctcattatgttgtccaggctggtctcaaactcctgggttcaagttatcctcctgtctcgtcctcccaaagtgctgggattacagacatgagccaccgcagctggccaagtgttctttctcagcctccctccctttatgcctttgtcattccctcaagcaatttccagaacctcctgtgtgtggggctctgggctaaggctctaggaacgtgtaagaccttgcctgtcctcaaggggttcctcaatctgtgagtaaccaacatggtaaaaccccatctctactaaacatacaaaaattatcctgatgtggtggcacgctcctgtagtcccagctactcaggaggctgacacaggagaatcgcctgaacccaggaggcagaggttgcaatgagctgagatggcgccactgcactccagcctgggcgaaacagagtcagactccatcgcaaaaaaaaaagagtctgccctgagtccttcctgcttcagggtcagaagagaggggtctccagggcaggaggcctcaggggctggggtcttgcctgtgtctgacgccttctcccctctcctcaccatccgcacacaggtgatctacatgggccgcaacccccgggacgttgtggtctccctctatcattactccaagatcgccgggcagttaaaggacccgggcacacccgaccagttcctgagggacttcctcaaaggcgaaggtggggacagggtaaagcggggcaggaggggtggggaggagccccagaggaccctgatgggcagagggacagaggaggggtaagaaagggagagagacagagacacagggcatcaaaaggggcaatagagacagagagcaggtggccaggagaagagacggagggagagaggctgagagaccgaaagacacaggacaggcaaaggacagaggagacagagacagggagagacacagatacaaaaagactgagagagagggcaacaaaagagacaggggcccggcatggtggctcatgcgtgtaatcccagcactttgggaggc[135 bp omitted]agacaggagaatggcttgaacttgggaggtggagcttgcagtgagccaagatcgtgccactgcactccagcctgggcgacagagtgagactccgtctcaaaaaaaataaaaaataaaaagagataaggaaataaatgcagaaagagagatggagtcagagagagacagggagagacaaggaaacaggaggagacaggcccctggtactaagaaaggcagcgccctttggccacgtgttcctttctctgctgctgtcagagaccctggctttggagggaaatccaggtgtgtggaggcggactggatggacagatagacaaaggccccccaagatgggcaaccaggggagaagcaggttggaagagccccagaacttggtggaaatgtgggggctctgggggagggcatccagctctgggggctggacctgggggtttgtggggcacagctagttagacccatgagccccagtggggctgggggaaccccgccactcagccctcaccccacttgtccctctgcccacagtgcagtttggctcctggttcgaccacattaagggctggcttcggatgaagggcaaagacaacttcctatttatcacctacgaggagctgcagcaggtgagtccccacctcctccaggtgcagcgtcccccccataccctctgctcacaccccacactctccccttcccgagggtctcaggacccctccgcttccccatgcaatgcgccagcccctggggatactgcaggaacagaacagaggccctgagcctgtgagcaagaccacagacaaaatccctaaaccacacagcaggctggcggggcagaggagctgaggagcaaaggcgagtgggaaggaagataaggaatggtcaggggcgagatttaacccaggagggttggccggacacagtggtagtggctcacacctgtaatcctaatgctttgggagcctgaggcgggaggaccccttgagcccaagaggtcaaggccacaatgagctatgatggtgccactgtactccggcctgggcagcagagcaaaaccctgtctcaaaagagagagagaaggccaggtgtggtggttcacacctgtaatcccagcactttgggagcccaaggcaggtggatcacttcaggtcaggagttcaagaccagcctggccaacatggtgaaaccccatctctactaaaaatacaaaaattagccgggcacagtggcacatgcctgtagtcccagctgctcaggaggctaaggcaggagaatggcttgaacctgggaggtggaggttgcagtgggctgagatcacaccactgcactccagcctgggcgacagagcaagaccttgttccaaaaaatagaaagaaaaaagattgaaccacatgaaatgcctgcattcaaccagtttttatttatttttatttattttatttaattaatttatttatttttgagacagagtttcgctcttgtggcccaggatggagtgcaatggcatgatctcggctcaccgcaacctccaactcccacgttcaagcaattctcctgcctcagcctcccaagcagctgggattacaggcatgcgccaccacgcccggctaattttgcatttttagtagagacggggtttctccatgttggtcaggctggtcttgaactcctgacctcaggtgatccacccacctcggcctcccaaagtttttatatttggaccagttatatatttatataactggtcggccccgccaactagtttttattttaagatggtaattttggctgggcacggtggctcacgcctgtaatcccaacactttgggaggccgaggtaggcagatcacctgagctcaggagttccagaccagccttgccaacatggtgaaaccccgtctctgctaaaaatacaaaaaaattaggcggccatggtggcgggcgcctgtagccccagctactcgggaggctgaggcaggagaatcgcttgaacctgggagctggaggttgcggtgagccaagatcgcaccattgcactccagctgggttatagagcaagactctgtctccagaaaaacaaaaacaaaaacaaaaaggtaattttatatggttttcccaaatgttgttattatccctattttatcgacgaggaaactggaggtttgtaacttaagagagggttgataatttgcccagggcacatggctcttgcctgcagactccatgtttattttttcccaacctggtaactttcttttaatggaaagctccagaagaggtgtcggtgctactcctccccctcttttccagcaagcattcttctccaaacccagaactgggccacagagcctaacagcttctgggctgcccctgggtgtgaggcgccgcccacatgttagaatttctgggacacgtcagtggttcaagaaggtaaagagaaggaaggttatgaaaccaggagtgacctggaaaatcggagccatggggttggcggagctgaccagagggctgaccat[133 bp omitted]gaaatcctgtctctattaaaaatacaaaaattagccaggcatggtggtgcatgcctataatcccagcagctactttggaggctgaggcaggagaatcactggaacccaggaggtggaggttgcagtaagctgagatagcaccactgcactccagcctgggtgacagagccaggcttagtctcattgtaatcccagcactttgggaggccgaagtgagcagatcacccgagggtgggagttcgagactaccctgaccaacatggagaaaccctgtctttactaaaaatacaaaattagccaggcgtggtggcacatgcctgtaatcccagctactcgggaagctgaggcaggagaatcgcttgaacccgggaggcagaggttgcggtgagacgagatcatgccattgcactccagcctggacaaaaagagcgaaactccgtctaaaaaaaaaaaggcagaggggcacaggggaggactaagggctccagggacctgagctcctctctggctgtgtggccttggacaagtgtctctccctctctgggcctctgtttaccaattgagataatgacacttcccttgcaaagctgatggtgggatcggcacaaatgtatggggggcttggatcagagcttggtacatagtagacactcagaaaggaaggtgatatttgagctgcagccgtggcaatgggcccttctggaagccccatgccaaggcccagagggaggaatgtgtagggaatggtgagtcccagaaggagagggtgggaaaggtattggaagagctgtgaccagaccacatctgttttttgggtttttttttgttgtttttttttttttttttgagatggagtctcactctgccacccaggctgtagtatagtggtgagatctcggctcactgcaaactccacctcccagttcaaacgattctcctgcctcagtctcccgagcacctgggattacaggtgcccgccaccacacccagctaatttttgtattgttagtagaaacagggttttaccatgttggccagactggtctcgaactcccgacacctgtctcagcctcccaaagtgctgggattacagacatgagccactgcacctgccccacatctgtgcttgaaagccgggtctgggtctgggactgtgtcccagggcactcgggagccacggaagagttgggagccagtgaggagcagggtcagctggggtgtgggggatgagctggagggggatggagactggaggcaggaaggctgtggagcagccggctgctgaggcatggatccaggaaggggaggatgaggcctaagcagttctaggctacagggacacagaggaggggatatggcaaggggaggcaggtggggagggacagggctcatgatggacaggttttgggggtgaggggtacccagagagggaggccaggctcctgggtggatggtggggccatcctgcaatgggggcctgggggaggagcaggtttgagatgtagaccagccaatgcctgtctctaacctgaaggagggtgattccaggtaaggtgatgcactgacctctgcccccggatgtgacctctgccccccactgtgacctctgcccccggctgtgacctctgccccctgctgtgacctctgccccctgctgtgacctctgccccaagcccacctattccctcccacctagagaaccctccaaagacagaaactgcaaaaacccttagaggcgatatagcccaacccctcagtttggagttggggaaactgaggcaaagaggcagcgtccctcaggcagccccaggttaggacccagacatgcggatcccaggttccacgctccttccttggccgagtgccctccctccgctgacccctctcccctgcctgcaggacttacagggctccgtggagcgcatctgtgggttcctgggccgtccgctgggcaaggaggcactgggctccgtcgtggcacactcaaccttcagcgccatgaaggccaacaccatgtccaactacacgctgctgcctcccagcctgctggaccaccgtcgcggggccttcctccggaaaggtgcgggggttctggggttcagagcccactaggccactgcccggctgtgtgacctgggagagttacttaacctctctgggcctcagtttctcacccagctgtaacattgggtgaacagggtcactgtggccccagggttgatcacgcacggggcttagcactgactcagcacacgtgccagccacccgaggcgtccccatccagagaactcccaacgacagcaaaacatccaggagtactgccaacgccaggtttacccgagagagatttagagtcttcatgagtcctcctcgacggccatgttcacggcagaaatactcaagccctgggttacggggcgcaggcggtagcatagttgtttcctcttcctgctgtaacaaaaacaccgcaaactccatgactcaaaacacgtttactcttttttttttttttttttttgaaagagtctcgctctgtcgcccaggctggctggaggttgcagtggcgcgatctcggctcactgcgacctccacctcccaggttcaagtgattctccttcctcagcatccttaagtagctgagactacaggcacctgaaaccatgtcaggttaatttttgtatttttagta[156 bp omitted]ccaggctggagtgcaatggcgcgatctcggctcactgcaacctccgcctcccaggttcaagcaattctcctgcctcagcctcccaagtagctgtgactataggcacccaccaccacgcctggctaattttttgtatttctagtagagacaggttttcaccgtgttagccaggatggtctcgatctcctgaccacccgcctcttcctcccaaagtgctgggattataggtgtgagccactgcgcccggccaagtgaagcatcttctaatctctgaccctcctcccttctatagggacccaggtgatgacactgagcccacccagatacttcagggtcctctccccatctccagatctttagcttaatcctatctgcaaaatcccttttgccacataaggtcacatattcacaggttccaaggattaggacgtggatatggagggagtctttattcagcccaccccagggaacccctccccacaacctcattaagggtgctgggtaacatggggcacgtgcacttgccaaaaggcaaactacggtcctctgaatgccatgagccccaggtttccaggtgaggggtgatgcccctgtga[132 bp omitted]taaacgccatctctactaaaaatataaaaattagccgggcgtggtggtgcgtgcctgtaatcccagttactcgggaggc[136 bp omitted]gctcgcttgctgcgccaatcagcaaattgtttgcaagccctgagcacagagcctgcagaagggggtcccttccatgtccaagcagtaatggctgcagcatggagcgttgtgggggcattgagacaggaggccttgttctagcaggggaggtttgggactggtcgcagaggaggtgacacaagctgtaaggtgggcaggaattcagggttggaggcagaggttctgggcagagacttaaagggtccgggataaaggggaggactggcaggaatcctgcagtagcagaggcagtgagggcggaggtgagaacggcgccaggtgacaggccaagactctgccaccataggacacaaagggggcaatgtggagggtagggaggacggtgtttctggcaaagggaacacctcgccaaaggccgggaaggggaaggaggttgctggaatgttggaggtaggggcgcagtgctccccagaggctcctcaccccctggtgccccctcttctccaggggtctgcggcgactggaagaaccacttcacggtggcccagagcgaagccttcgatcgtgcctaccgcaagcagatgcgggggatgccgaccttcccctgggatgaagacccggaggaggacggcagcccagatcctgagcccagccctgagcctgagcccaagcccagccttgagcccaacaccagcctggagcgtgagcccagacccaactccagccccagccccagccccggccaggcctctgagaccccgcacccacgaccctcataataaacacgtcgattctgtccaggttccttgatgcgctgtggcagggcaggcagcggggcgtggagaatcctcaccacaccaaggcttccagaggccggggtccccgactcagagtcccgcccagaggcaaaggtgctgcaggaacccagcgctgggcatctcacttcccggggtgggggcctgactccccagtctgagggaggagggggctgggggcctggactcctgggtctgagggaggaggggctgggagtctggactgccgggtctgagggaggagagggctgggggtctggactcccgggtttgaggaaggaggggctgggaggctgcactcccgggtctgagggaggagggtctggaggcttggacccctcagtctgagggaggaggggttgggggcctggactcccgggtctgagggagtagtatctgggggcctggagtctcgagtctgagggaggaggagctgggggcctggacccctgggtctgagggaggagggggctgggttgtggactcttggattcagagccagtctttagtaacgcacgtttttggcataaagtggttttattccgagcagaggtaaacgggagctccggcagacccgccctctcagcgcccacagaaagtcccaccacccaccctgttcccctgtggctgtaccacattccactccctcagtattcagctccttgcctcagtttccccacagctcctgaacacagtgtgcctggcagcgactccccatcttcccctccacagctctagcagctctagctcggggcctcacccgggcccctcatcaggaaggcctgaccctcgggagctgtgtgtgtcttctttaggatccgctgcctggggacgctgccagcccatcttctgggttgtgacactgaggtctggtgcaggcaatgggcttgcccaagtccttttttttgtttgagatgaaatctcgctctgtcacccaggctggagtgcagtggcgtgatctcagctcactgcaacctccgcctcccgggttcaagcaattctcccgtctcagcctcctaagtagctgggattacaggcgcccgccaccacacctggctaatttttgtatttggtagagatggggtttcaccatgttggtcaggttggtcttgaactcctgacctcaggtgatccacatgcctcagcctcccaaagtgctgggattacaggagtgagccacctcgatcagcctttctttttcttttttcttttttttttttttttaaagagatggcctctcactgtgttgcccaggctggagtgcaagggcatgatcttggctcactgctgcctccacctcctgagctcaagggatcctcccacctcagcctcctgcgtagctgggaccacaggcgtgcgccaccacacccaactaatttgtttttttaattgtagagatggggtctcactatgttgcccaggctggtctccaactcctggccttaagcaaccctcccaccttagcctcccaaagtgcagggattacaggcatgagccaccactcccggcccaagttgcagaacaagtgacaaacatcccttctgcttgacagacgccgaggccagaagccttgtccaaggcagggcattgaggcagagggctctgagccgacagttgtccggcactgctccttgggtgggccagcagatttggcttgggctcctgttcagggttgccccccaagtcctgcccggggggcccagtctgacggcctgacgcctctgggctcttgaagtttgaatgtagcatccccaccgaaccgccttcgggctggggacagatagcggaggcggtgggcggggggcaggggcagggcaccgccccacggaggtcgggagtccacttccccccaggggcctcctccagtgccccgctgcctcatcagagccttggctggagtgtccttggagccccaggatttcttgagctgtggagggaaagagagggaggtgagaggaggctggggtggggccctgggggcatcccagatccagggaag[143 bp omitted]tgaaaccctatctctactaaaaatacaaaaattagcctgaggtggtggtgggcgcctgtaatcctagctactcgggaggctgaggcaggagaatcgcttgaacccggaagggagagattgcagtgagctgagatagcgccaccgcactccagcctgggcatcagaacaagactcagtctcaaaaaaaaaaaaaggaagtgatagaggatttgagggaggtggaaggagatggtggaggagggaagggagggaagagaggagagagggaggagagagatggaggccggacgcggtggctcacaccagtaatcccagcactttgggaggtgggaggattgcttgagctcaggagttcgagaccaacctaggcaacacagtgagacctcatctctccaaaaaatacaaaaattagccaggcgtggtggcgtgggtctgtaatcctagctacttggaaggctgaggtgggaggatcacttgagcccaggaggttgaggctgcagtgagccgagatcatgccactgtactccagcctgggagacagagcgagaccctatctcaaaaaaaaaaaaaaaaaaaaaaaatgggtggaggaggtaaaagaagaggaaggggtaagggagaaggtgagggaggagaaagaaggagaggagggaggaggggagccaggaaggagagagaggagacagagagggtgaaaggggaaggatgaggtgaggaagaggcaggaaggcagcagcaggaggagggacagaaaggagagggatgcagaggaggaagcaggtaaggaggacggtgtggggagcccgagagggaaggggggaagtgagagggcaaacctgggaccccctaacctacagagggacaaggagctgggtccccacctctgcagctggggaggaaccggaagcgccggcatctgccagccgggatcaaatatttgccaagggaggggatgctgggtgagggtgctcaggaccaggtgaaggtaaggaccttgcccctgcccatcccccgtctcctctccagctaggagccttccttgcctgggacggagggagatgattcctgattcccaaggcattgcagagcaagaccctatctcaaaaaaaaaaaaaaaaaaatatatatatatatatatatatatatatatatatatatatatatatatagctttctttggcctgggatgaggatgtcacaaaataaataaattccacttcaggaatgtatttatttattgtttattattattattattattattattattattattattattattttgagacagccttgctctgtcacccaggctagagtgcagtggaacgatctcagctcactgcaaccgccgcctccctggctcaaacgattctcctgcctaagcctccggagtagctgggactacaggtgtgcaccaacacacccagcgaatttttttgtatttttagtagagatagggtttcactatgctggccaggctggtctcgatctccctgtttcaggaatgtattgttgttgtcattactactctatttcatttagccaagtggattcctcccccaaccaaactcggaatgagtgcccttgctctgctccttcctagatgaggataccgaggttcagagaattcaagtcctcggcttccccccacctagtctgtcatgccaggatttgcacccagggctctcctgtctctgccccatgccacccagcgcccacctgcccaaaatgcagcaggcgtgcaggaaatgaacaaacgatgccattatgaatttaggggtgcaggccctcaggaaacgcctgctctggctgggagcagggcccctggagcctggcttgcaccaccctgggcaaacgccttccccttcctgggctccatcttctggcaccagccacaaggtctcacctcgttgtccccatcactggagccagacagctgggacaggcggcttaggtcccacatggagcggctgggccgggccggggggccgctgggggtccgggcgcgctgcacactccttagaatgtcactgagtgccggccccggggtagcaggggagacgcggcaggcggccaggcggtgggccagcgggccgtcaggcggcggaggcgacgcgggggccacggagcggcggcgggacacgcggtgcgggctgcggccccgctgcaggccacctatgaccgagggtttctgggggggcgcaggtgggagcgggcaggaggccgcgtacagcgtccggaactcaaggctgaaggcgtcaacaatttcaccagtcagcagggtcaccaggcctcggtgcaggcgtgcgtcactccacgtgaagctgggggtcggggagtagggggtcagagtctccaaccctgagggcccagcccggcccccatcctcagccaggtcccaggggagaccgtaggacctcaggcgagtcctgacctctccagcctcagcttccctgtctgtagaatgggcacaactgaagtacctactcgggaggggtggagtgaagacagcccaagttaagacacttatataatcagggccaggtgtggtgactcacactttgggaggctgaggcaggagggttgcttgagcccaggagtttcagaccagcctgggcaacatggtgagaccctatctctacaaaaaatcaaaaaaactagccaggtgtggtggcgcacacctgtactcccagccacttgggagactgaggcgggaggatcccttgaccctgggatttttttttttttttttttttttgtgagacggagtttcgctctttttgcccaggctggagtgtagtggcatgatctcggctcactgcaacctctgcctcctggcttcaagcaattctcctgcctcagcctcctgagtagttgggattacaggcacctgccgccatgcccggctaattttttgtatttttagtaga[143 bp omitted]ccgtgataataccactgcattccagcctgggcagcaaagcaagaccctgtccccctcgcccccctcccaaaaaaaaaaaagccagatgcggtggctcactcctgtaatcccagcactttgggaggctgaggcgggcagatcatgaggtcaggagtttgagatcagcctgaccaacatggtgaaaccccatctctactaaaaatacagaaattagctgggtatggtggcacatgcctgtaattccagctactcaggaggctgaggcaggagaattgcttgaacccgggaggtggaggttgcagtgagctgaaatcacaccactgcactccaacctgggcgacagagcgagactctgactcaaaaaaaaaaaaaaaaaaaaaaaacttatctggaatcagactggagtttaaacccaggctctgcctggtccccacttaggaacacctcaatgcctcagttttcccctttggaaagagacggaattcacttccggacactaacagggattgttttaagacccagctgcttcctagaatgactgccatttagtcagtcctggctgtgcaccaagctctccacgttgctgctccctgcagtgct[133 bp omitted]aagaccccatctctataaaaaattttacaaaattagccgggcatggtggtgcacgcctatagtcccagctactctggaggctcagggaggagaatcacttgagcctgggaagttgaggctgcagtgagccaagatcgcgccactgcactccagtctaggcaacagagcaagatcctatttttttttttttttgagatggagtcttgctctattgcctaggctcaagtgcagtggcacaatattggctcactgcaacctccacctcccaggttcaagcctcccaagtagctgggattacaggtgcacaccaccatgcccagcaaatttttgtatttttagtaga[153 bp omitted]aacataggaatattcaaatgactgaatttgaatcaagccccctgcacgtagctggccctgagagcctgtgagctgtgggggccggtgccctaacacttcctgtcatcacagtagttgttattgaaagcaccaagtgccaggcgtggtgtggtggctcacgtctgtaatcccagcactttgggaggtcgaggcgggcagatcacttgagctcaagagttcgcaaccagcctggcctacatggtgaaaccctgtctctactaaaaatacaaaaattagccagatgtggttgcatgcgcctgcagtcccagccactcgggaggctgagttacgagaatcgcttgaagctgggaagcagaagctgcagtgagctgagatcacgccactgcactccagcctgggtgacagagtgagagactccgtctcaaaaaaataaaagcaagcaagcactgagcatgaatcctggcacacagcaagtgctcagttaatacaccctcttctttcccagcctctttggaattcaatgaacctggctctcatcctggctcggggaccctggatacatcactttccccagccttagtttacccatctggaatatggggtcactatgggaggtgtgaggctgaagtcaagcccttggcgggtgtacagcacagagaatgcggacaagcttgtggccagcgtcctctgggttcagggcgtcttcaccttggcagggatggcagagccctcttgcgccccggcaggtcggcggggcaggccaccccttggattgtgacacccactcctctcacctatgacctcatccccagagcggccagtgggaaccctgagggatctgtgagatcactcattccattcacagactcttgttgggcagcagccacccgctcacctccatccccaggacttagagggacgcagggcgttgggaacagaggacactccaggcgctgaccctgggaggccaggaccagggccaaagtcccgtgggcaagaggagtcctcagaggtccttcattcagcggttccgggaggtctgggaagcccacggcctggctggggcagggtcaacgccgccaggccgccatggtcctgtgctggctgctgcttctggtgatggctctgcccccaggcacgacgggcgtcaaggactgcgtcttctgtgagctcaccgactccatgcagtgtcctggtacctacatgcactgtggcgatgacgaggactgcttcacaggccacggggtcgccccgggcactggtccggtcatcaacaaaggctgcctgcgagccaccagctgcggccttgaggaacccgtcagctacaggggcgtcacctacagcctcaccaccaactgctgcaccggccgcctgtgtaacagagccccgagcagccagacagtgggggccaccaccagcctggcactggggctgggtatgctgcttcctccacgtttgctgtgaccaacagggaggacagggcctgggactgttctcccagatccgccactccccatgtccccatgtccttcccccactaaatggccagagaggccctggacaacctcttgcggccctggcttcatcccttctaaggctgtccaccaggagcccggtgctaggggaagcatccccaggcctgactgagcggcaggggagcacggcccgtgggtttgattgtattactctgttccactggttctaagacgcagagcttctcacatctcaatcaggatgcttctctccattggtagcactttagagtccatgaaatatggtaaaaaatatatatatatcataataaatgacagctgatgttcatggagcattctttgttttcttttctttttcttttcctttttttttttttctttttgtagagataaggtccagctatgttgcccagggtggtctcggattcttgggctcaagtgatcctcccacctcagcctcccaaagtgctgggattacaggtatgagccacggcacctggccaagcctgtcttacgttacgtgccactgaatcctcacaccaagctgggaaggtaaacactctttcaaacatttcaaacatcctggtctcaactccaatcattctcaaagtgtggtccctggaccagaaacagcagcagcagcaagtgggaacttcctgaaaatgcagattctcaggtcctgttccaggcacgatgaatggcagtggggtccaaaagctgtgtattgttctctctttttctttttgaaacagggttttgctctgctgcccaggctggagtgcagtggtgcaatcttggctcattgcagcctctacctcctgggctcaagcaatcctcccacctcagcctcctgagtagctgggactagaagcatgctccatcatgtctaatttttatttttttaaatttttgtagagatggggtcctgctatgttgcccaggctggtcttgaagtcctgggctcaagcgatcctcctgcctcagcctcccaaagtgctgggactacagacatgaaccaccacgcctggcctttttccgttttctttttcttttccttttttttttttttttttattttttgagacagagtctcgctcggtcacccaggctttagtgcagtggcgcgatcttggctcactgcaacctccacctcccaggttctagcgattctcctgcctcagcctcccgagtagctgggactagagatgcattccaccaggcccggctgattttttgtatttttagtagagacagggtttc[132 bp omitted]gggattctggtgcatgcacagggttgaaagccactgttcctgagcagtgttctcagctgggcacctgtgctccccagtgggcatctgcgctgtctggagaggttttcggttctctaattggcagggaaagtcgggggtatggggcgtgtgatgctactgacctctgctgggtggaggctgaagatgccgaggagcctcccacaatgcacccaacagctcctaaaacaaagacttacccagcccgagcgtgggtgccacccctgttgagggacctggttctagaggctctaaccctatcagcccatgacatagagggggaaactgaggcacagagaggtgaagtaagttgcctgaagtcacacaacgaggaactgagagagctagaatttgaatccaggccgtctggtcccagaggccacacccctctcctccctagctgtgctgtgaccctgtgaggtaggtgctgttattatttgcagtttctttctttcttttttttttttttttttttttgcttttttgagatggagtcttgctctgtctcccaggctggagtgcgacagcgcgatctcggctcactgcaacctctctcctgggttcaagcaattctcctgcctcaacctcccaagtagctgggaagacagggtttcaccatgttggcc[131 bp omitted]ggcagagcttagatcccaatccaggtgctcctgattttgaacaaaccccacccccaaactgtttgcccagttttccagataagaaaacaccaggtcaaagagaagcagacttacccaagaccactaaacaggccagcaccaggtccggccgcggcaccaacctcctccgcagggaagagtgttttgcccccattacacagatgagaaaagagaggcctgggcaaggggatgccagctgttctctgagcacactgagggaaagtggggtataggacgccgggaggtggggggcggggcgggggctacacctgtaggatcctgagatgaccctctcgccgtccagcagcacaaacttctcccgcacggtgccgctcacctgccgtcgccagcggctctggaagctgcagccccgcacgacacggacatccacgttctgttggtgtggggagtggagggtacacccttgctgaggcccactgcatggattcaggctccctccagactggttctaactgggggacc[140 bp omitted]ctctactaaaaatacaaaagttagccaggcatggtgacacatgcctgtaatcccagctactggggagtctaaggcaggagaatcgtttgaacccgggaggtggaggttgcagtgagccgagatcacgccactgcactccagcctgggcgacaaagcaacactccgtctcaaaaaaaaaaaaaaaaaaaaaaaaaagaagtatctgtctcagcttccttagagccactgatatcaaccctcaggcgtttcttggggatacccaaactcagtgactcaagattccttgggaatgcccacccccacctccccagtgctgtgggcatcagatcccaggggaccatccctgctagcatccatctcaatgacccggagctccatggaagggtctgcccccactgcccccatgccaggggaatggggactcacaggaccccctggcccggcccctacctccgtgttccaggggttcacccccagctgctgggccagttccaggaaggcaggcagctgctggcggtccaggagcaggtagacaggtacccagcggcgcgtggcagcatccaccaagtccaaaagcaggtctgggtcagtgaagacgtccatgaccacggccaccagctgggcatggggagaggggcggtgggcttgtgaacggaagctggctcaggggacactcagagggtgtgggaaacctgacatctggaatctgggagtaaagtgctctgggggctgggagtttaaagttcaggtgggctaaaggggagacccccagacatacactgctgctcaaacagcacctacgtgtgaatgagcaaaacgctgcccctccatgagatccccagcccctcctcgagattcccggcccctaaatgctggaaaactgtaatcataaatcatgtttgcttgtttttttgtgtttttgttgttgttgttgttttttgttgtttttttttttttgagacggagtctcactctgtctcccaggctgcagctcaggggcgcaatctcagctcactgcaaactccacctcccgggttcaagcaattctcctgcctcagcctcccaagtagctgggactacaggcgcccaccac[141 bp omitted]ggctttttttttctttttttaaaagacgaagtcttgctctgttgcccaggctggagtgcagtggcgcaatatcagctcactgcaacttcggcctctgggactcaagcagttctcctgcctcagcctccagagtagctgggattacaggcacccaccaccacgcccggctaatttttgtatttttagtagagacgggatttcgccatcttggccagggtggtcttgaacccctgacctcaggtgatcccccagccttggcctcccaaagtgctgggattacaggccgtgagccaccgtggctggcctacaaatcacgtttataacacagaacagcgtcccctgagctgcgacactgcggtacccaaatgtccacggcagtttggctgtaggatcagtggtggatgtcccgtagggcactgtgggcaactgcatttctgggtcctgtggaattttctgggtgctgggtgcaggacggctgacctgctaggccaccgtggcgaacttgggggacacggaggtgctgaaggcctggatcttgcaggcagcataaagcagtggaaaccctgactcagcagccagacagcctgggttcaaatccccactcggccacttacagggaagagatttaaccgcccccgtgcctccgtgggcacaatagtccctctggcggtacagggttccgggacgatgatgcacattagtccctgagaaacccttcacgtgggagctggcggacgctaaggctgtgaagtacacagcaggctttccaagggctgcagtgtggacatctgggccttccttggagggagagtggaaacccctggcttggtgatgaggggatgggggaatgactgagactgggggtgtcataattaggttcaaggggcatcgatacctaagggcatccaggtcttgggggagggtaggggcccccatttctttctttttttttttttattgagatggagtctcgctctgtcgcccaggctgaagtgcagtggcttgatcttggctcactgcaacctccgcctcccgggttcaagcaattctgcttcctcagcctcccgagtagctgggactacaggcgcccacaccatgcccggctaatttttgtatttttagtacagacggggtttcactatgttggccaggctggtctcaaactcctgacctcgtgatccgtccacctcggcctcccaaagtgctggaattacaggcgtgagccaccgcgcccggccgggcccccctttctgagagtaaggatgaggtctggggttgtaggcacctgagtcctggggctggaaggtgtgcactcctgggtcccaggggtataggtcctttagggtaggggtgtgcgcttgcaagtcccaggaggacaagggagagaatgcctgggtccccgtcccagtctggtgaatggacacagggcccccgcgacacccaccttgtgggcagcctggatctccagccgcaccagctccttgaggggcggctgaccctctccaggaggctgggtgtacagctgcgcccgggtgatgcctttccacgcagagtccactggccagcccagccgcaggacgggcgccggctgctccgactgcccaggccagtagctcaggctgcccgcgtccacatcggtggtggtggctccctctgccatcccgctgggctcctgcttggccactgtccagtcttcagctgccgctgccaagccctgaacctcatccgcactgaggaagggccacagctcctcgcgctgcacgcaggtctggaacgcctccgcgcccttgctcaacagagcctccagtgccagccgctggccctcggaatatagaaagccggggctggccccgggcaccctgggaccggagtccactccttccagcgccgccagctgggaggccgccatcggggtcactcgggtgggaggactgactgtgagaggctgggtccccgggggtctggctgtctctggggactgtgatcatctgggggttctcctgataggcagaccctacgtggccatccgaggcctccggcggggccctgcagatgtccaaatggctccctgcagcagcccctgccacactgttctgacaatcacgctgcccaaataagcgaccatccaatgtgtcaggccactcagatccgccacctgcctgcacccagtggcaccatgcctggctggccttccgtgaccttcctgccagccgtctctgctggtcaggttgacctcctgacaccatccccaactgtgtgacccatcagctggccatctctgctcagccacacgacagcctccaacccaccagtcacacagtgcccagtcagacccttcagctgtcctgaatttggtcaggctgaccacttgatcatttccaggcggcaagctgcctgcctgtctctaatcacccaaaggtccttaaaggcacgacaggttgcctgcctgcccccggccaagagcacgacgaactgaccctctccttccactgtctggcaaacgccaatggcttccgactgacagtcacagtatctgcctgttggagcatctgtctctggccaaatctgacagcccccacgagtttctcctgctcatcagctctcacccgcagaccagccaggatgcctctccactgggcctgctcgctcagccttaaaggccgaaggcttggcaaacccttccctaccctgtcaatgggggaccctgctccctggaccctcctcacactccttccagctgctgcagtggagggtgaaatgcgctacaggggtctccattactatgggacaggtctatgatcttcacagcccatctaggtgtgagtgccacctaaccagccaccctcctcaggctggctgcccctgcctggggcctggccctgggacctgttccaggccgtcctctgatctgcggggagccctacccaagctgcccccagcctggtttctgcctaaatgctatctcctgccagctacccggacgcttcttcccggacaggggccagtctctatctcgccctgtctccctcccaagcctcagttatccccttgaggctcctgacccaacctcggggaccctggacccttgatccctgcaaaccagaagcccttcattccaatcccaccaacccaggccgctgcttcctccagaccacagcagggagctgcaaagagaagaaaggagtcaaggcaggccagcctccccgccccaccctcacccatcccccccatcgccggggctcacccacaccggctagtgccgggctcaatggcctcccttccagtgcctgctttttccgagaacgtaggctgtggctccccggcttctacttctgcggtgcttcccggcttctggcctcactcatcaggcctcgacctggaatccagggagcccggccccttgtgtaaacacaggagggcccccacaggcccctggaggaggtccgggggtgcggctcacacgctttctttacctgtgctctcccagggggtgaacgcccctctagactcaggcttcccggtccccggggggttgagattgcctcacctgttcccaggcagtctctccctccccacagccctgccagcctgcaccctgcacttcccggtccacgccccacccgccatcccagcaccagggaggggcacaggatcctttaagaggggcgggcgtggctgacccaaggaagccggtgtgggaacacctgccacctggctgttgggaaggaggcagggagcttccggggcagtgggggcaggaagagggctggtcttcactggcatgacgtccctgtccccaaaccaaatgcattctcacccgcaggaaccaattctccaacccatcccccaataacacacacagagcactgtcagcaaaaatctttttaataagagagtaggatccagggttagtttttgtagcctcggctggcccgtcggcctctggcacgctcgaacttccggcccttggagcggacgtagggtctgtggggagaggagggagtgagaggggggccctcttaaaggaggccattgtggagtggcacaggaacaccacaagcctgtcacattcagccccaggagagtcaatgctgctggaaaagcttggcagagtgggaagccaaggagccaggaggggctatggaagcacctgccccaccacctggagggtcccagcctgggctggcaaaggccggtgaactgcatgctccccaggagatgcctgctcaggccctggaaaacacagctccaagcagtgttgaagggaaaagcaggcaggatgaggcagctgagagttccagaaggcctggggctggctggtacgagggataggagaagcagcccaagtgtggccaggcctggccctgcaggctgagtctggggagagggcagggctgggggcctgatactcacttggtgtggctgtgcggggttcctggggccttgccgaaatgccggtacacctctcggcccttgcgaggacctagggaaggggaaggagaaccgggtgagacagggatctggcgcccagcttctggcctcccagatccaggagggtgaaggctgccagtagccacacagctcagtccaaacccgtcgaccacgtatcactcaccggagagcaggacagtgccacagcccttaggggagtccagggccagctggtcgaaagtgaggatcttgccccctgccctgaggatgcggctgcgggcccggctggtcacgcgcagtgcacatacctggtggagaggacaaggctggcgggtcagacccctgcgtggtcacccaggggctgccaggactcaccctccactgccttggcgcagcagagccctggtaaccaacactatcgtttactacccggagcaccctgggctgacagcagcagttctcaacacttccggaactttcaccaccacatccctggtgttatgctagaaactacagcaaggaagctgggccaaaaaaagacctgtgcagaggtgacaaaggagtctagacttgagcccaggctgtctggctctaggggccagcactaacagtttacaacttgccccagaagaagcttgcccaggggaccccaccatcaaccatgccagagacgacccacaccaatcctcaaagccactcagacaggcaggatgcttgcctcaccagcggtggcaagactgaggatggaccagcacagcacagcacagcacagcacagcacagcacagtacagcaagggtctgatgggtctgcccagcccccgccagctcaccttcagtttgggtacctcctgaacccgcacatcatcagttatggtccccacaaccacggccgtcttgttttcccggccaggaagcttcatcttccggatcttagggtggggaggatgtacgtcgtaagttgttctggtgtttacattcagccccgcttgaggcatccccaggccagggcagctgtgccctctaacgggaccccccactcacaccacaccccttaaaccccacaggcctctcctcaggtccagctggggaaagctccagataaaaaaaaaaatgcagactgttcaatagggcctccctcagcagagcctttgacataaaactcagttatgacttggggcaatctcctgaagccaccaggacacctccacctcacaaagagaaggagaggaggaccaggagacttgcccactgcccatggacactcagttccaaccaacagtccaagctctacgctcgcgactggctgagacaaacccttgatgccctggttgctcccagagctccaagtcctgcctcccttccagacagacaagacccagcggctcccaggtctaccgtgctctctggaccagccactcaccatccgggaaagggacagaggcggccggttggtgcgactcataaacaacctcttcaacacaacctggttgaatgtggagttggttcttctggccagaaacctgtataactggagggacgggaagacagtgagaagctgggacagcctgctcccccgcagccttccagtgaaggggcaaacacatgatgatctggactaaaataatctttatccctttcccccaacccaccgacctagagggagaaagctggcccaggtccttcctggccaaggacctagaaaatcctggctccactcccgagctgtacacagcctagaggctgaaaatacaaatgcaggagaccctggaacagaaccagagacccgagactgctctgcaggcccctgggaggagcttggtgccagcactagaatggaggatctgcaagtcagacctggggtgacccttcccaaagacctcagggcccagcctcaccttgaccaacagcctcaggtagatatcctggctcttgggctccttgcgccgaacctttcggtccttgttatggcggatgtccactccctgtgggggtgaagaggcaaccatggacccaattacccccaaccatagccaattattacttatttctgaaactgagagctgggacacaagcccaggtctgaacacaccagctcaaatcccaggcccaccaccaggagacctgtgggctgccactgatccctctgtaaaaaggggctgtttacaaagccttcagcccatggcacacagaaccctgaaacatcgtaacacagcaatcatattaacttaatacaaaaaggtcaattctttacaacttgtattttgcaacaatgttatcaaaactggttcccatacccggagggataaccaaaaatatcaaaccaatggcagtaatgatgaaaacgaatccttattcagaacctagcaatactactagaaccacctctcctacagcatcagtcaatccaacaacccttaccaaatagtgtctttttaaaacatcgtttttaaagtggagacagggtctcacaatattggccaggctggtcttgatctcctgggcaaggaatcctcccgcctcggcctcccaaagtgctaggataacaagcgtgagccgcctcgccaggctcctaccgccctgctgcctttctgagcaacttaagtttttcagactgtgttgacaattacaagaactatttaatagctccacttatgcagcacttactgtgtgcaaaaccccgtgatgagcatctcctgtgaattatttcttcccaaattcacaaacttgtcagatgagattactgtgtacccaacgaacagccagacactggggcaaaggctcaaaaaccatcacaaggtgggaaggggcctgagactcagagacctgcctggtccccaaatccagttattcggctctcgatcctctcacccgccgcggcccccatcgaacccgacttttcatactagaaagtgacaggtccagataaaggcagcaaagccaaataactaagagtggctgcgggtccagccacctgggtcggaatcctggctctgccacttcctggctttgtaaacccagtcatatcagcctccgagtacctccacttggtcatctactaagtgggggcggtaggctatgactgacccatccctgctttcctggcccccagagtaggtccccagtatcgggaattgctccctccgggcagccgcagaccccctgccgccctccagcgtgcccctagcccaaaaccacggcggatggcagcggattatccagccccgaacgccgcaaagcgagctcaccatgatggcgcctcctgctcggccaggtccggaaagagagaacgggctggggtgggcggggaaagcctcaagcgagtggcgccgccgtgacgtcacatgggtgcgacgcggcgctctaccacgatccggacttctctgtggtgagttggacgactgactagccgggcgataacggcagagagcatagagcgcaggaacaagcgcaacgtccaagagggaagggccagcacgtcgggggcctctctggccctacccaggccgtgttctcgatagctttccggaagaaagggatctgggagcgagatgcgtgtagctagcacgatgcgtcgcgcggtgacgctctggcccgacgccgacggcctctcagtggctcccggaggacccggcgggcccagtgttggaggtgaggaggcggggctggcagggctagtcggggcatctggaaatttccgaccccacgcttcgggcgtttccttatcaggttcaccgctccctgatctcgcgctgcacttcgtaggcgcagccgctgcttgggaagtcctacttaaggtctaacccgagatgatcttgctgcacctcaatctatagcatcctgtattcccatcctttgagttccgcttctccttctcccccggcccctagatggcccttccctgacctagaaagagggagacagagtttcataggggaggcaaaatggagactccgtggcttgggggtggggggaatggaggcccaaagggtaggaaggagacctagaaagaggggtgagatggagacccagggagaagtagtggcaaagaaagatggtgagatggggccttgcaaggctataaccaaattcaaatcctggctctgctagttactaatggggtgattgggcaagtcatttaacctctctgtgatcttgggaaaatcacttaacttctttgggccttactctccttatggacaaaaaggggatgacaacaggcctggcacacaggggtgtttttcaggattatgaaagttaataaaactgctgaggtcaatattttgcacataataagtgctcaataaaaattagccttcactcctattatagcatacatattgtgtgcaaccagatggactggctggggcagtgattaaaatgacttatctactcttccccccacccgccagggaggcccctgcctcttggttctcaggcacattgagcctggaagggcctcctgcagttggctgtcaatgctgctcctcacttacctctcctccacagagctgaaggtcaggccaggacagtgagacctgactccttgctcctaccagcctactatggcttaagacccagggccagggtcccgttgatgtaacagagcagaggaccagcagatgaatggacaccttgaagcagaggagcagcaggaccaggtaagggaccatctaaaagccaagatcctcatactgtggaaagacaaaatctgaagcttttctttaaaaaaaaaaaaaaaaaattggaggccaggcgtggtagctcaagcttgtaatcccagcactctgggaggccaaggcctgcggatcacctgaggccaggagttcgagatcagcctggccaacatggtgaaaccccatctctactaaaaatacaaaaattagccaggcatggtgatgcgcacctgtaatcccagctactcgggagactgaggcaggagaatcatttgaacccgggaggcagaggttgcagtgagccgagatcgcgctgcactccagcctgggtgacagagtgagactccgtctcaaaaaaaaaaaagaaaaaacagggtctcactcttgcccaggctggaaagcagtggcacaatcacagcctactgcagctgcaacctcctgggctaaagtgatcttcccacctcagcttcccaagtagcctccaccatggctggctaatttttttatttttatttatttatttattttgaggtggagtttcgctcttgttgcccaggctggagtgcaatggcacgatcttggctcactgcaacctccgcctcccgggttcaagcagttctcctgcctcaacctcccaagtagctgggattacaggcatgcgccaccacacccagctacttttgtatttttcatagagatgaggtttc[133 bp omitted]tccctctgttgcccaggctggtcttgaactcctgagctcaagggattctcccacctcagtctctcaaagtgttgagcttacaggcatgagccaccgcgcccagcctgggagcccttccataagtgatttcagaccttctctccaggcaggtgttccagtgggataatttaggaatcagagaaactgaggggttgaggaggatacttattatttattatttaggtgcactggcccagtcagattaacatcgaaaaagactgagcaccgaacaaagagtcaagttacattttaagtatttcgtggggtagggggagatctgtgcagggggaagcatattatagcagcgagaaacaaagacagttattcaattgagacatgcattacattatttcttacttttcaaggaaaaacatgttttaggacttgagtttatcctgtctagtgaccttgcagctgcacagttagagaaacagggtcttcacgatgcctgggaaagggagttagataaggctcactagccacaaac[223 bp omitted]c[139 bp omitted]ctttctcttcctcagggggaattgggttttttacatacaactgagtttttgcttacacattctttaatttcttttaattcctgtttcagtgtgaatagctttctccctacttcccagacaggacagctgaggccaagaattcaggggcttcccagcagtcacacagcaagtgtgtgtgagctgcagggtcctttctccttttcctcctccctgtcctctcgtctgtgtgacttaggctctatgtttgaatctcagcttctttgcccagtgtctctgcctttccttctcccagggccccaagctcagttgctgtgccccagtctcagtcttactgggtttctgttcccccttctctccgtgtcattccttggcacatactatctggtgctgttgctactgtgggttggatgc[137 bp omitted]acctccgcctcttgggttcaagcgatctcctgcctcagcctcctgagtagctgggattacaggtgcgtgctaccaca[137 bp omitted]cggtgaaaccctgtctctactaaaaatgtaaaaaattagccggacgtggtggcacgtgcctctagtcccagctactcaggaggctgaggcaggagaatcgcttgaaccaggcaggcggttcagtgagcctagatcgtgccgctgcactccagcctgggtgacagagccagactccatctcaaaaaaaaaaaaaaaaaaagagagagagacgggggtttctccatgttggtcaggctggtctcggactcctgacctggcgatccacccgcctcggcctcccagagtgctgggattacaggcgtaagccaccacgcctggcctacagcctacatttgtcactttctagtgagctctgtccttgtctcctaatgcatatctctttctctctatgcaattctgtttctaagtctcctaatatatacttgcctttctttcaatttcaccatgtctttgcctcggtgcatctgtcaacatcttcactttctgtcccagttcctcccagcccctgggcttccaatattctctccctccctcacctttgacctagagatactgtccccatctctctgtctctgtcttgccatgtgactggttcattcactgggcagatgtttatctcatgccgcttccattctggtttgagcctgagataaataagtctgaattaatgagcctctccttcgcggcttccattccagaagtgtctgtctccatctgtctccgtgtctgtcattttcagggttttcttgtatccttaccttgcacattctcaatcccactgttttggtctcttgtttatatctctgcttttctctgggtctctctgactctgtaactgtccgaaaaaaaagtatccttcactttccccactctccctctcctcccagctctcttattgcctcatccaacctctgtgggtctctgccttgctctgtgtctggatcggatctctgggcctttgttacgcgtgttagagtctctgtctttgcagctaaagacctcctccctcacgccccttttcttttgtgaattcaatggatgagacaggcccactctcccttaacaaagatggcgacaacggcgctgtctatggggccgcgacgtcgtctccgctgcgcgtcggccctcacccacgatggcggccagtctcccgaagcgcgaggccccgcccagctctcggcctctcccgcggccggtccctgcaccaagctcgcgagctgactggctccaccccccgcgccctcgtattggtgcggcccaggccggctgcacggccattggctgagcggatgcacaccctccccccacccctaggtctgatgggggctgttggtgctgacttgcgggaccgcctggaggaggacccggcgtgtgaggagggtgcgggggtcggggcagggaccggagtctaggggactgagggaccaagaggaacagagactcaggcccgggactggggcaccggggtgggagatggaaatggaaaacctgggccaggactgaacccagccaggcctgggactgggttctggaaataagagtgcggatggcggtttgggggcccagggccagacacgcaggcctatggattggggaccaatggatggagacccaggtccaggtctcggggacccagggacagagacccaggcccaagactggaggacatctagggctctgtgcttgaacctgatttgaggttcccataatggggccagggcaggtttgggggtgaagcagacgtcctggacccgagagagccgctggggataggggggcagatgtagttcctaagggtgagtccacaggcggtggggggtggggggctgtcctggcgctctgggcctggggaatgtgaggggcaggactggcaggtggctgggcggggcagtggggaacaaaggtgagcgaaaggaggaggcagaatccgggcagagggcagggagagggcctgtggggaagggacctcagtcctgctcccacccgctccctggagagcaggcggccagacacccaggtcagtgctcagggaccagctcttggcccctgccccttgcaggcgctcgcatgtggctcctctcggaccccgtagtccctgtcatatcccttctctccagctgtctccatgcctgcctcgtacccctcctatttgctctcccttccactctgtcttgcctttctcgttggggtgaaaaagtcttactctcttaagtatctttcatcgcctgagtttcacctcattgaccctgtttgtctcctctcagtgtttctctggctctcagaccctatctctattgcgtttgtgattgttttgctgttttacccactgcaccgtatggggggtgggggtgtcggggaggtgtgtctttcagtctttgcatgtctgtttctgcatatccaatcccactatccattccccttcctgtgccttcttttcccccaaagcccgttatcatcacccaaccacctgtatatttcaatcctttctcttgtttatctattcctatgaaggcaaggatttggggctattttgtctcctgctgtgtttgctaggcctagcaccgtgattggcacataaagggtactgaatacttactggggaataaatgattggatgtttgcatgcccgggtctccggccccctctgggatgctggcctctgtcccgcatcctcaaggtctgcccacacctgtctgagcctgtctgtctctgatgctcctgtctcacctgccactgcccctcattgtctcctcctgtccacagcccctgcccctccctgcccctgccatggggtcctgaattctcaccccttctctcctcccttcccacagaggccagaccaggagctgaccgggagctggggccacgggcctaggagcaccctggtcagggctaaggccatggccccgcccccaccgccactggctgccagcaccccgctcctccatggcgagtttggctcctacccagcccgaggcccacgctttgccctcacccttacatcgcaggccctgcacatacagcggctgcgccccaaacctgaagccaggccccggggtggcctggtcccgttggccgaggtctcaggctgctgcaccctgcgaagccgcagcccctcagactcagcggcctacttctgcatctacacctaccctcggggccggcgcggggcccggcgcagagccactcgcaccttccgggcagatggggccgccacctacgaagagaaccgtgccgaggcccagcgctgggccactgccctcacctgtctgctccgaggactgccactgcccggggatgggggtgaggtgctgggcagctgctctatcctggagccaccttggtgtctctgcagaatttcctccataggcagctgtgtctttatttttctgtgtgtctgggtgatgtatctctctggatccgttaggagtgatacacagggatgggctacagaaggaacaaaaagacaagaggaccggatgtggtggctcatgtctgtaatcctagcaatttgggaggctgaggcgggtggatcacctgaggtcaggagttcgagaccagcctggctaacatggtgaaaccccatgtctactaaaaatacaaaaaattagccgggtgtggtgctgcgcacctgtaatcccagctacaggagggtgaggcaggagaatcgcttgaacccaggaggcagaggttgcagtgagctgagatcgtgccattgcactccagcttgggcaacaagagcaaaactctgtctccaaaaaaaaaaaaaaaaaaaaaaaaagcacaggcagaggtcgcgtgcagtggctcatgcctataatcccagcactttgggaagccaaggcaggcagatcacctgaggtcgggagttcgagaccagcctggccaacatggcgaaaccctgtctctattaaaaatacaaaaattagccgggcatggtgacggatgcctgtaattccagctactcgggaggctgaggcaggagaatcacttgaacccgggaggcagaggctgcagtgagccgagattgcaccattgcactccatcctgggcgacaagaccgatactccatcacaaaaagcaaaacaaaacaaaaacgcaggcagagaaaagtgatttacatctgctgttctcttgctagatttatgtttctgtctcctatcctcttcccctttgcatgggtcttgaccacaggtgagtcacccagggtggtgagagcagcagcctgagacaggaccaggtaccacccagagtgatgggtgccaacagaggtctagggcttccctggagttcagaggtggcatctaatcctgcctggggcccctaagggctggaagtaacctaatcctgggtaataggtgtttggggtgaggaaagtgggaaccacagctctgaactacagctcctcccacacatggggacaaagggcatttggtttcacacctaagccctgcctttgtctcagcagctaggagttggggcagggctgcatacctaggcctggccacatgagagccagcaggtcccaggggccagccctccaccaattccgttgggggctgatgaagggactgtttccaaggtggggggcctgggtcactggcctctgcagaccctaacctctctccacagagatcacccctgacctgctacctcggccgccccggttgcttctattggtcaatccctttgggggtcggggcctggcctggcagtggtgtaagaaccacgtgcttcccatgatctctgaagctgggctgtccttcaacctcatccagacaggtaagggccagtgagaatgggagctgggggctgggacagctgagtcctaagggagcaaagtggtgggtgggactcctgggtctatggggctggggtgggacagcctgcctaacagcccggtatcccacttcagaacgacagaaccacgcccgggagctggtccaggggctgagcctgagtgagtgggatggcatcgtcacggtctcgggagacgggctgctccatgaggtagagcaggagcaccctgcccctagccctgggccctgggggactatagagactgccaccaggacccaggcttctggtctcccaccctccaggtgctgaacgggctcctagatcgccctgactgggaggaagctgtgaagatgcctgtgggcatcctcccctgcggctcgggcaacgcgctggccggagcagtgaaccagcacggggggtaggttgaggataccacgaagggagggatgagcccctcctggggtgatagggacccctatatctcccactcagccaaacccacagtcagtcaagtaaatcagcctgcctgtgggatgctcacccccagctcctggacatttttgcctgcctgcttcccagctgtatcccgagcgcccagaactctgcctggcatgggaggcactcagtgaattgtagggagcaaatgaaagatgaccaggaacctggccccgtaaggagtcgcctggaggtggccccacggctgtggtgggcctgggccatggccttcgtggtctcattgccagctgctttcctacctgtctctttccccaacccctgtttgctccttccttctgtgtgtccgtccatctccggctgtgaagatttgagccagccctgggcctcgacctgttgctcaactgctcactgttgctgtgccggggtggtggccacccactggacctgctctccgtgacgctggcctcgggctcccgctgtttctccttcctgtctgtggcctggggcttcgtgtcagatgtggatatccagagcgagcgcttcagggccttgggcagtgcccgcttcacactgggcacggtgctgggcctcgccacactgcacacctaccgcggacgcctctcctacctccccgccactgtggaacctgcctcgcccacccctgcccatagcctgcctcgtgccaagtcggagctgaccctaaccccagacccagccccgcccatggcccactcacccctgcatcgttctgtgtctgacctgcctcttcccctgccccagcctgccctggcctctcctggctcgccagaacccctgcccatcctgtccctcaacggtgggggcccagagctggctggggactggggtggggctggggatgctccgctgtccccggacccactgctgtcttcacctcctggctctcccaaggcagctctacactcacccgtctccgaaggggcccccgtaattcccccatcctctgggctcccacttcccacccctgatgcccgggtaggggcctccacctgcggcccgcccgaccacctgctgcctccgctgggcaccccgctgcccccagactgggtgacgctggagggggactttgtgctcatgttggccatctcgcccagccacctaggcgctgacctggtggcagctccgcatgcgcgcttcgacgacggcctggtgcacctgtgctgggtgcgtagcggcatctcgcgggctgcgctgctgcgccttttcttggccatggagcgtggtagccacttcagcctgggctgtccgcagctgggctacgccgcggcccgtgccttccgcctagagccgctcacaccacgcggcgtgctcacagtggacggggagcaggtggagtatgggccgctacaggcacagatgcaccctggcatcggtacactgctcactgggcctcctggctgcccggggcgggagccctgaaactaaacaagcttggtacccgccgggggcggggcctacattccaatggggcggagcctgagctagggggtgtggcctggctgctagagttgtggtggcaggggccctggccccgtctcaggattgcgctcgctttcatgggaccagacgtgatgctggaaggtgggcgtcgtcacggttaaagagaaatgggctcgtcccgagggtagtgcctgatcaatgagggcggggcctggcgtctgatctggggccgcccttacggggcagggctcagtcctgacgcttgccacctgctcctacccggccaggatggctgagggcggagtctattttacgcgtcgcccaatgacaggacctggaatgtactggctggggtaggcctcagtgagtcggccggtcagggcccgcagcctcgccccatccactccggtgcctccatttagctggccaatcagcccaggaggggcaggttccccggggccggcgctaggatttgcactaatgttcctctccccgcgggtgggggcggggaaattcatatcccctgttcgtctcatgcgcgtcctccgtccccaatctaaaaagcaattgaaaaggtctatgcaataaaggcagtcgcttcattcctctcagaccttctgcccttcctccatccgacagcccgcgggaggactcagactccagcacttccagcagcgcctgccctctatggacgacagcccggagctgcccacgggctgcagccagtatgccagggagctgccctcttcttccacaacagctggctctggggttctcaagatttattcaggatcgtgttaacggaggcggtgggaggatagggtccctgacgtgccggggacacacacagagaaccctccccgcccccgcaagggaggggggaggctcgctttttcttaaaaatataaatgtatttatctgcattatcacgtccctggggcacccagctggccggcccgtgggccacagggcaggaagggaacagggcgtaagtctcagcaaggcggaggagagctccgccaggtggggatgtggggcagcctcacagggccccgtgctgggcctggtatcgggacagcacggcgcggtagtgggacagctcctggcgcacggccacaacttcctgccgcagcagggcgttctccttctccaggaaggccgcccgcaccgatatctggttctccttgagccgccgggcgtcacgggaccgcttggctgcctcgttgttcttgtaccgccggctccagtatttctcatcctgcaggagaagagggggagagcactgaggtccagagggacccaggtcccagcgagagaggaagggagccccagcagcggggcctaaaccacaccaggtctctgctgggataggtacccaagggtctgcctttctagggccctggttgctaaggagattgggcccctagcaacagtaaaggcatgagatagaccccccaccctcaagcaactcgcttcaagtctccactctgcaaagcggaccccagccctccccacatgataaaggcctgcatgcagttagctcttgcttgctaaggatgcttgttccctagcaacaaggccttcatggtctgagggcttctcccaatgaagagcactgccctgccctgcacattgcctttccagatcctggttgctaaggaaagcttggtgccctggtgatggggtttggtgtcccataaaatcctcgcagagctggggccttctgacctggttgccaaggcaacctcatccatccttggcaaacaaaagtgaggtctaagtggtttcaatgactgtggccagcctctgacctgctggccttgaactgaggccagagaatagcctcctccccagtaggacctgactgagagaagagctgtctcttaggaaaggggactatcctgagacctccccagaggattatacctaaagtcctcccatcctggaagttggttcctaaggaagactcctccttagtaaccaaggaccacggggctcagaaagatgctctctactccactatttaattaaagcccagttcctgcttgtgagggtaaatccagtccctagcaacagggccctctagaaggagaaaccactggtgtagatctgacttccaggccagtcctaggtgcttcaagtagctatgtgttacgcaagggtatggcaaagtcttgtttgtttttgagatggagtctcgctctgtcgttcaggctggaatgcagtggcatgatctcggctcattgcaacctccacctcccaggttcaagcgattctcctgcctcagcctcccaagtagctgggattataggtgcccgctacca[136 bp omitted]gcctcccaagtagctgggactacagatgagtgccaccatgcccagctaatttttgtatttttttgtagagacggggtttcaccatgttggccaggatggtctcctgatctcgtgatctgtccgcctcggcctcccaaagtgctgtgattacaggtgtgagacaccacacccggaacatttttgtacttttagtagaggcgaggtttcaccatgttggccaggctggtctcaaactcctgacctcaagtgatccgcccacctcagcctcctaaagtgctaggattacaggcgtgagccaacgcgcctggcccggaatgacaaagtcttgtaacagaagcccaagcaactcttgctagggaagactccagtaatggcaaaaaacaaaatcatgcaaagatgcaatgactgctcaaatcaccccaaatcagaaagtggcactggctgctaacagaagcctgaagtctcccaccagtgagaagtccaggcccaggaaacaaggcctaaaggggctggcacagtcttcatcctagccaaatgcaatcactccaaaggaagtcccacatcagagatcaaaggcctgctgagtaaggagagacaggccacaggctgatatcccattgccaaaggaagactgtcctttgcaagtgtgcctggtggagctctggacccaagtaataggagaagctccaagtctctacaagtagacctagcagagctggctgagtcagcaccccacagtgacactgtcttttgttttaagacaaggtctccctctgttgcccaggctggagtgcagtggtgtaatcttggctcactgcagcctcaatctcccaggcacaagcagtcctcccacctcagcctcccaagtggcttgtagaaatggggttttgccatgttgcccaggctggtcttgaactcccgagctcaagagatcctcctgcctcagccccctaaaatgctgggattacacgagtgaggcccctcgcccagttgacactgtctttataaacctcaggcccctgcccccttgtgccccgtggccaaggaggactaatctgtggctgcaggccaggagaggctgagcactaatcccaaggagaagcccaggcttgactgtgagaaaaggcccctccctggctgtggggcatgtctccagccaagtctatctcccacatccagctctgctcaccttctgctcctccggcacctggatttttcttgccttcttcatgattggctggggcttaagttcctcttctgagaagcgatgtcttcgagggtcaaaggtctcgtggccaggaatgcttgatagggcaagatcagctgggtcgggttcaaaggtcatcaacacctccacggtgtctgggtccacagggctgggtgtgtcccgagaggtcaggccttggggaaacagcacgtgtcagctgagtgtgtattttaaggagggggtttcctgaagctactttttgctgtggtatcatagccacatggaaagtccttctgggatctagcataaattcggccagggattaatctccctaatataaaatatgaaggttcccttggccaggcgcagtggctcacgcctgtaaccccagcagtttgggaagccgaggcggcgaatcacctttagtcaggagttcaagaccagcatggccaacatggagaaacctcatctttactaaaagtacgaaaattgcccaggtgtagtggcgggtgccggtaagcccagctactagggaggctgaggctggagaattgcttgaacccggaccctggaggtggaggttgcagtgagctgagatcataccactgcactccagcccggacaacagagcgagactccgtctccaaaataacgagaaaaatgaaggttcccctaagccataaagatgcttagagatcatggagccatatccacctttacaaacaaggaaactgagtcccagtcataactgacttgccctaggtaacacacgaatcagggctattgcttctacacttgatcttagccaaaaggccgagaagcgatggggctattgcttctaaaacctcaggacttcagatgcacagtctagcctgaatcctacttaccgaatccacgacctaagcttagaccccagactgtccagagaaaaagaatctactgcactgaaaagctctcaagttagagtctaagagctactcgctggaaagaggaggagaagctgctctaaggttccagaagattggttcgaaaggaggcgcctgtacctttaagcaccagccagccggggccagctaaggacacaggttcagggccgagtcacgtgctgacgcctgcttccctcctcctcccttcctcccaggcccccgccatcggcgccctcacgttcccccggccccgcccccctcgcgcttgaaggcgcctgcgcgaagcgcggaggagggatgggaggactcacgtggcgcaggaatgtgccgctgggaagggtagggccctggttcggcccggaggtcggacctggagcaggtgtgcccaggaatccccgacctgcagtccgtccctggagacctcaatgtgcccaaagggaaacatctttcctcttgctcttccagtcacttagttccactcaacctccaaagattcccaaccccctgctctccggggagcatcggcctcctggaccttcccagaacccccgccactgggctaccacgattctgggatcccaggcctctcctaggaatataggaagcttggccccagccccaattggaggatccagaaacaacatccctaacgttttcccttctgaagaactctgggacccggggctgcagcacgccccactgggggacccagggacctgggctgccagtctcttatgtcctgggtaaacagaattctgtgcctctcctttgcctttgcccctgtaaaggacctaggggctccagtcctatcccagttccatcgattatgggcccagattcgggggtcagtccactccccagtaaataactctggtgttccggacttccagttctggcttcacgagtatccacatcgtttgtccccaagtcccacagaaaaacccacaaaatctcattgggcaggcttcctggaatttagggttccaagtctctcctcccccatggatccattggtccctgacccattaagagacaccgaatctggccccctcccacgacacctctcgacaactggacacagaattcgaggccgcagccaggtcccacggtcccagcccccagcgtcgcacagccccgccccctgagtccaagccccgccccgtcaggacccgccccgcccccttcgccgcacctgcgcggtggccgctggcggtcccgagggcagcccgggcgggggcgtgcccaggagaggagcggggggaagccgagccgcacgaacccggccctggggagggtgcgggcgtccgcgcgggcgacggctccggcgacgggccaccggggggcggcgggctgggcgggagcccgtgctccagcaggaaggcgtccaggtctacgtactccacatcgccgaacggcagcgtgcgctcccacagcagtggcgccaacagacccggggcgggcaccggccccgggcgcccccgcggggaccctccgcccaccactgccccagccggggcatccgccgggcccgcagtctccaggcctggcccaggggttgtggctgcaggcagggccgccttgcgctccttttccttcaggagacctgcgggccgggaaagacgggttgggatgagggtgaggtgggggagatagagatggagaagagaccccgagtccgagaggcacagggcggagatccagagaaagaggggacggggggtcggagaggagagacgggagaaaaagggacggagacgcagagtgggagagagacccagaaagaatggagacgggggtggcagagacaggtggacagattcacagagatggggacagaatgccgggaaggaatagacacacagaaagacagcgaaccagagaaagagagacggaagttcaggaataggggggcagggacagggtaggtggagggttgggcaggtgagagaaaaaatgacagctctgtaatttcactgtaattacccaacccccatcccctgcgcgctgtacccccttcccctcccccaccatctgtaaggggcaggaaggggctctattcctggggcacatccctcatccctagactccatgtgaccccatgacgccccgcccaagcccgtgtcaccaccgtgtgagcacccgacacaccccctccctgggaccccaggggtccagactcccggaccaaaaggaagaggaggctggggcctacactcttgtgaactaagcggggaggacgttggggacgttggtgcctgggtccttagggtggacgggcttcagagccggcgcttttgggtcctgggcgctaagggatctaggggcctaaacacctgagtaattgagtagattaaggttgggaagatggactccccgcacgcaggtttctatgggaccccaccccacggcacctgagtccctaagggggtagggtgtccgaagtgggtgagatgggggttagaactcacagctggccggctctttgggcttgctggtcccctgcagaaggctccgcaacccaagcagcgctcccccgccagggggtgtcccggccgggccgcccagcagcagaggggccggggtcctgtcgctcacaggccgcgccatcgcctggcacctgcccccaggctcacgggttcatggagaggcgaagggctggcctgccagtcaccagcacactccagtggtttggacgagtgtctgcccaggggcgggcgagtgtagcctgcaaccctccagtatccagaacgctgcaaatcctaggagcgacggggatttgaggtcctcggtgcagaaacgtgcaactcaagagggtcccgggagatcatgcaatctgggcgagggggtgtccagatcaagcggtcggctctttgcaaccgagggtgagaggggactcaaggcgctccttctacaaggtgggcgagcctggctcttgcaaaatctgcagctctcgcaacggaaggcgctttgcaatctgcaccgagaggtgtgcgcggaggggcggaggagggggcaggaggaggcggccgccttgaggcgtggccaaagcaaacttctttcgcggaaaaaaaaatccaaaccaaaacacccgacgccacagcgcgcgcccctcctccgggtccccgcccggcgcgtccagccccgccagcctctatgggcatgcaacccagccgcgtgcctccctccggctgcaaacacggaccaatcgtctccgacaccttgagacgcacagccaatggggcctctgggtccgccagggcccaggagggcgcgtgaggggctcagcgcgtgaagttgccttgcctttcggtgggaggcgggacactgacctacatttgcccaatgggaggcggtactggggggcgggaccgtgacccagtttgggccaatgaggcaggcgggagggggaagcacatggctctgctcgtgctgcctgatggcgaggggggtgatggggggaaaaggggcgccgcttaaaggggccgcggtcctaaagatggttttgagaagcaggaagccaaaataccgagagcggaggtttagaaagaggaagattggtttccggaagaagtctgttctttaatacccaaatgtttccccaccgcgcctagaatcagaccactgagaaaacaggaagtattctgtccctttaatagctttgttttaggggtaactcccctcgccttgtggggaggcttaggacgggcgggtgcaatcctcgaaggggagtctcagcgaccatgggggacaccatccactgtaagacagagaacaacggcagggggcgtcagtataggatggaaggggcggggggtgtgcagggggcgtgggctgcgccgcgctgggccctaccgtcggaagtctgcgagcggggaaccagaatgtactaggtcgagaagcactgggctgaaccacaagaagccaataggaggggggaatcgggacgtccagattcagcagtaggctgaactacttgaaggtcttcatgggggggggggggtgtggactgtaccatgttgcgaagccgggggtgtgtgagattcctgggctaaaccacagggaggcagaggtggagggaaggggttgtaccttgtagattctcagtaagggggaagggagcatcagattgtggaacagcgtaaggtagtacgacttggaaagggagagaggatccaaattgtaccattttggaaattcacagtaataggaagcacagaacagtaggtaattggaccataggaaggcaggggtcaagggttatagaccaagttacaaagcagtgaagaggaaagacaaatcgtgggctagcaatggcctagggctggcaggtggactgtaccacatagacatgtagggaaagagagaaaaagagacagctcacgaggctagaccatatagacgcaggaaggaggatgggactgaatcacactgagacaccaaggggagacacatataagagggttagcccaagacttagagggggtgcagactggaccataccatgcaggcggtagttggggcctcggcagcgcctctcggggtgccgggggtccctgttgcccctcagtgccctgtgggccaagggctgcaggggccggctgttaccgctgaggctctggaagatctgagatggaggattctggctcaggagtctcagggagtgcatctgcagtggaaggagggtgggaaactgggagtgaatagtgaatggtcttggtgacgtcacgcaggaaaccccgcccctgggagcaggtgggcggggtctgttctcagccccacccacccccaaggtggtctgaccctcttacctacttgagttcagtctatgaggagagggagggcaggtgagcaaggggatgcccaggccagtgagtggagtacccaggcctaggaagggcggtgcggacagagggtcacctgaagggaggtgatattgagggcccggtcaatgaggatccaggtgacagtctcggagcagggcggggtgctgagagagccctgataggtgatgaagccgaaggattcagggaacaggagctccaggctcaggtcttgaagaaagtaggcatcatctgcgggaatatcaggccagagtaaagagggatggcactcttgaaccccctcgtgtgtgaccactgcccccagcacgccagggacttactcttgtaggagatgcgagtgatggtgtcgcggttaaggaggcgactgaggaatgggttagaggtactggcaacctgtgtgggggtacgaggtgaggacacaggagcccagaagtccaagccctcaaccttctcctcccccaggacccaggagtctgggcctcccagcaccccgcttccctcagaccccgggttccaggcacccaactgctccctccctctgaatctcgcctccgctcacgttgacaaagaggctgagaatggccaggccattggggccgcgggaggcagcgctgaaattcccgtagagttcctggttgaagtgaatgagctgcacctgggggtagcacagagcatggggtcccccagcagaaggggaggagagcatgaccccagctttgggggcccgaatcaggctgaggattagtgcttagggtgggaggccagttctgtggaggaggatggggtgagacactaagagggtgaggtgggaggaattggggtgactcagggcggagggtggcgggtaaacaatcagtggccactacctcagcagagaagccctggtggttgatctgatgttccgagccggctccgtcgcgagctccaaacagcagccgcagttcactgagtcggtggctgtaaaggaggggacctccagacacattgaccacaggtcggggtgcaggcaggaaggagacatgtcggccggtgttgtacaaggttccccggagctgtgggagaggcgggagctgtcagggggcagggagagatcttttatctctcgtttcccacgcctacattttctgattccaacagtcttttttttttttttttttttttttgaaacggagtctcgctcttgttgcccaggctggagtgcagtggcgtgatctcggctcaccgcaacctccgcctcccgggttcaagcgattctcctgcctcagccttccgagtagctgggattacaggcatgcgccaccatgcccggctaattttttatttttagtagagacagggtttctccacg[142 bp omitted]ggttggagtgcagtggcgagagctccgctcactgcaagctccgcctcccgggttcacgccattctcctgcctcagcctccagagtggctgggactacaggcgcccgccaccacacccggctaattttttgtatttttaatagagacggggtttcaccgtgttaaccaggatggtctggatctccggacctcgtgatccgcccgcctcagcctcccaaagtgctgggattacaggcatgagccaccgcgcccggctttttgtttttgttttttttttttttaaatagaatctcactctgctgccgaggctggagtgcagtggtgagatctcgcctcactgcaacctctgactcctgggttcaagcgattctcctccctcaggctcccgagtagctgggactacaggtgtgtgccaccacacccagccaatttttgtatttttagtagagacagggtttcactgtgttggccaggctggtctcaaactcctgacctcaggtgttctgcccaccttggcctcccaaagtgctggggttacaggcgtgagccaccgtgcctggcctccaacagtaatttaatcattcaacataatttgaacactgaccactttccaggctctgtgccagtttgtaagttggtgcccaatattggtgaatttgtttgattaacaaatattgactgagctggtgctatgtgccgtggatgcaagaatagagcaataaacaagtagacaaaagtcctgggccttatggagtttatgttctaatgaaggcaagacagacaattgtgaatcacataagtaactgcttaattaactacatcctgagctcatgtttgggggaactgggagctctgaggtgtcatggggagctcagcttagatgggggatgtcaggaaaagcttccctgcaaaggtgacattttatttttatttatttattattttgagacaaagtctcattctggcacccaggctagattgcagtggtgccatcacagctcactgcagcctcaaactcttgggctcaaacgatcctcctgcctcagcctctcaagtagctgggaccacagtcacataccaccatgcccaactaattttcaattttcttttttttttttttttttttttggtagagagggttctccctatgttgcccaggctggtcttaaattcctgggctcaagtcatcatcctgccttagcctctgaaaaatactggaattacacgcatgaagcactgcacctggccaaaggtgacattttaatggggacctgaaggataagcaggggtgacttgcaaaagaacaaagagaagggcattccaagaagagggaacagcaagtgcaaaggccctgaggtggcctgtttgagtaacagcaaagagacttcatcaaagtccagtgaacagaggagagagaggttatgggggctgaatggtgcaggaccttgtggaaaacagtagagagttttgtatttttatttaaataaactgcatatataggctggatgtggtggctcacgcctgtaatcccagcacttcgggaagctgaggtgggcagatcaccagaggtcaggagtttgagaccagcctggccaacatggtgaaaccccatctctactaaaaatacaaaaaccagctgggtgtggcggtgggcgcctgtaatcccagctacttgggaggctgaggcaggagaatcgcttgatcctaggaggcggaggttgcagtgatctgagatcattccattacactccagcctgggcgacagagcgagactccgactcaaaaaataaaataaaataaaaataaataaactgcatatatataacacatttgccagaatgccaaacatatagtaagtgctatgtaaatgtttgctgttattacatatcctaataggaggattttgagcaggagtgatatgatcttatttgtgttttaaacatctctctagctgtggggtgaatagattgcaggaagttgagaggcaggccagtgaggagggtacgccaccagtccaggtgggagatgatggtgcctacatgagactgggggcagtagagggcgtgataggtgaaaggatttgaataatatttagcagcaaggctagaaagaacatggattggaaatggacatgagggagagaggataggatggggaatggctttgaggcttttggctggggcagctaaatgaaaggcagtgccggctcttataagaaatggtattggccaggcgcggtggatcacagctgtaattccagtaccttgggaagccaaggcaaggaggatcacttgaacccaggagttcgacatcagcctggacaacatagtgagaccccacctctacaaaaaacttaaaaagttagccaagcatactggcatgtgcctgcagtcctggcttcttccttcctttccttccttcccttccttccttccttctctctttctctctttctttctcgctctctctctttcttttctctccctctctctctgtatttatttctttctgagatggagtcttgttctgtcacccaggctggagtccagtggcgtgatgtcagctcactgcaacctccgcctcccgggttcaagcaattctcctgcctcagcctctcaagtagctgggattacaggcacatgccaccacacccggctaatttttgtatttttagtagagatggggtttcaccatgttggccaggctgatctcgaactcctaacctcgtgatccacccacctcggcctcccgaagtgctggggttacaggcatgaaccaccacacccaggcatgtcctagctatttttgaggctgaggtaggaagatcacttgggcccaggaatttgaggttacagtgagctatgactgggccactgcactccagcctgggtcacagagtgagatcccaattccaaaaaaaaaaaaaaaaagtatggttcccagcatggtactataaagcaggtcccagcattcatgctacgctgcttggtttgaatgccagtgctggctctctgtgtgatcctaggcaagtaacttaacctctgtgtgtcagtttctgcatgtatataataaggttaataattgtacccattttggctggacgcagtggctcatgcctgtaatcctagcactttgggaggccgaggcaggtggatcacctgaggtcaggagttcaagaccagcctgaccaaaatggagaaaacccatctctgctaaaaatacaaaaaattagctgggcgtgatggtgcgcatgcctgtaatcccaactactcgggaggctggggcaggagaatcgcttgaacctgggaggtggaggttgcagtgagctgagatcacatcattgcactccagcctgggcaacaagagcaaaactccatctcaaaataataataataataataacaataataataattgtacccattttgtggggtggttatgagatgagaggcttatcaaggttttaaatctgcctggcacaggaaatgttctgcttttcattgcttctgcagagatggggagactaggggaccatgcttgggatgggaagaatgggtgatccattttacagtgtaagcagcctcctctccacccactgggtgtcccctcctcccccaaggctgctctcctacctcagcaccccattccccagcctctattcatgcccatccccagtgggttcaatagctcctccctccaagccccttaccttctctcctccagtgctgagccttaatgggggcagaaaggggtcataaagaaccctcttcagctccacatccacggggctctgccgcttccccacagcacacagactccacgctgcattcaccaggccccagaaaggaggccctgggggtggggtcggagtaggaggacaaggagtcagaaatagagactggatcccagggctggtatctgctgagtgggctgtggtctggactcccagatcccaggggaggaggggctagggacctagactcctgggtctgagggaggactgggctcagatccagaattctgggtcctagaagaatcttggaatagtttccaagtttagcagagacgggtttcaccaagttggccaggctggtcttgaactcctgaccacaggtaatccacccacctcggcctcctaaagtgctgggatttcaagcgtgagccaccgcgcccagccgatcaaacccatcttaagccactgtagatggaactacaactcccagcaggccccagtgctaccagcctacccctctgctgcctacctgccccagagccccgtgggagttgtagttcttttttttaatcgctcttatcccacagctggattattattaatgtgttggggagaggagctgcaagagaaggctggacaaggtgggggacggggccacccagcctctggttcctagcaggagccaggaccttcctctcccggcaaacacacacataatctccacccccacactttccttccactcactcccactcactacttgaaatgcgcatgtataatgtcccatggtgagcccctggggttcagaagctggcccgactcctgagggacagaggagggggctgggactcctggtcctgggggggaggagggagctgggaacccaggttcctgagtctgaagaaggaggcgccgggagggccggactcctgggtccccgccttggcggcacctggcacgaagtttccctggagattatccttgtagctccaccagtcctcggggtcaggtgctggtccgatgtgagctgggaagagagcagcctgaatccctctccttggcatccccacctccaccctccctcgggggctcctcccgggaaccccaggtcttacctgctgcccccagtgcagcccagagtaccagcgctcgaggggcgctcagacgagctgcagcccccatccccaggaggcctccgagggacccctgcccaacgccctgcccccctctctcagctcctctgtcccctccttctgggaccctgtccctccaggacttccagctttcctctcctccccacagggagtcccagttccccaaatgccaaagcagccagggactgagatccgcccttcaaacccactcttcttctctctcccgtctctctgtgtctttcctctttcctctgctcttttcccggaaccctccagtctccctctagctcctgatcttcctactcctctcagccttctgctgcccccagggctacctcttggttcctaacccacacctcctctccgttctcttttcattaagctctcccaagccacctaactccaggtctccatcccgcatctcctcctcctcctccctctctcctttccagctcctgcctcttctcccctctctccttcttcacctcctcccgccctccctcagtgtcggcctccagcttcgtgctctccccacctcctcctctcctgcctcttctccctgtttcagtctctcttctctcttgtcccttcctccctcctccccctccctctctcctctcccgtggtgttatttaattttgttgttgggctgggggagcaggtgatctcatagcggcaaacactcctcgggttggcttggggtgggatgtgcgaaagggcaggattcggaaggaggtagggggctggtcctcggctcccagccgcgctggggccacgcgggcgggggtggccgggacacctggggccgggagcaggctgtttccatcctccgcagcaaggggaagggggggcgcttaaggtggagctgggagtggcttcggaagtctccatgctgggggccgccggccttggcggatgcagggtccccctgctcgctgggacccaggttggagccgccccagcgcccgcagccccccttccccgccccagggctccactgggtctctgcctggggctgccttaacggggccgggggatcccctaggagcctgaagtgcagtgagggctgctcgcctggagggggaggcagagacctggcgagggagagaggggcggggaggaggagccgggagggcagaggcggagagcgggaggtgaggacccacatctgcgtaggctggggaggggaagggagcctgagatggatacggagaggaagggcggagggacagaaggttagagaggcaagaacaaaccgccaggcaggagtgaggaggagggggaggaggtgaaggaggagggggaggagggagaggagggggagggagaggagggggaggagggagaggaggagggggagggagagaggaaggaatgaatgagagagatacagatagaggcagaaaaggagatacagagacgcagcgagacagacatggagacatagagacacacacttagagatagacagaaactcagagaccaagcagcagatggggtggggagagacaaaaagagagaaagagcgatccaaagacagagagagacaccacatttttgtatttggggagaagagatggggtcatgctatgttgctcaggctagtctcaaactcctgtcctcaagggatcctcccaccttggcctcccaaagcattgagattacaggcatgaacaaccatacccagcctcagagagaccacatattactgttgttgttgttatttattatttttcaccccgtctaatggtagtgaaactgctcattgtcttcttttattttcttttttgagacaagccttgcaatgtcacccaggctggagagcagtggtgcgatcatggcttgatccagcctcgacctcctgggcttaaacactccttccacctcagcctcccaaatagttgggactacaggcacatgccaccatgccaggctaatttttaaaaattattttttgtagagatgtagtcttgctatgatgcccaggctggtccggaacccctgggctcaagggatcctcctgccttggcctcccaaagtgctgggattacaggtgtgagccaccttgtccagcctgacaccaaacattaacgagacagagagacatagaaagagacacacatacatcagtacaggtggagagagacacagagagggagagacatagaaacacacacacagactgagcatggtggctcacacctgtaatcccagaactctgggaggtcaaggtggatggatcacttgaggccaggagactgagaccagcccggccaacatggccaaatgccatctctactaaatacataaaaacttagccaggcatggtggctcacgcctgtaatcccagcacttagggtggtcgaggtgggtggatcacctgaggtcaggagttcaagaccagcctgaccaaaatggtgcaaccccgtttctactaaaaaatacaaaaactagctgagcgtggtggcacacacctataatcccggctactcaggaggctgagacaggagaatcgcttgaaccgggtaggtggaggctacagtgagccgagatcccaacagtgcactccagcctgggcaacagagtgagactccatctcaaaaaaaaaaaaaaaaagaaagaaagaaagaaacacacacacagagctagagacagagacctgggaacaggcacacacacatctataaatagagacactcgtgcagagaaagagacatcaacagagaggaacagatggacagagatagagagacccagatagagggagagaggaccagaagcagaccaactgacatgatgggagagactacaaaggaatcagaaagacagaggtattcagagatagcaaattgggatggacattcaaagacctagagatggagagagacacccagaaagaaacccagagagtcaggggtggagagagacacgaagaaaaaacacaagaaggaaaggtacatactaataatttattgctggcggggcttggtggttcatgcctgtaatcccagcactttgggaggctgaggagggaggatcacttgagatcaagagtttgagaccagcctgggcaacatagtaagacctcgtctctattttttatgaaaaagaaaaaaacaggccgggcacagtggctcacacctgtaatcctagcactttgggaagctgaagcgggcggatcacgaggtcaggagattgagaccacggtgaaaccccatctctactaaaaatacaaaaaattagccgggcgcggtggcgggcgcctgtagtcccagctcctcgggaggctgaggc[138 bp omitted]ggggaacggcagctcacgcctgtaattccagcactttgggaggccgaggaaggcagatcacttgaggtcaggagtttgagaccagcctgaccaa[137 bp omitted]ggtgaaaccgtgtc[131 bp omitted]gtgtggtgacgcatgcctctagtcccagctgctcgggaggatgaggcatgagaatcacttgaactcaggaagtggaggttgcagtgagccgagatcacaccagtgccctccagcctgggcaaagagtgagactgtctcaaaaacaacgacaaaacaaaacaaaacaacgacaaaaaaatctgttgttgtgtgacaaattaccctaaaactcagtggcttaaaacaacaaacatttattgtgttcacagttcctgagggccaggaatgtgggaatggcttcattgggtggttctggatccttcttgagggtgcagtgaaactgttggacagggctgcagtcatctcaagtcttttatgacctagtctcccaaagtcacacaccttttattccacgcatcagaaatgagtcactagatcta[144 bp omitted]tgaaacctcgtctctattaaaaatacaaaaattggccgggcgtgttggctcacgcttgtaatcccagca[134 bp omitted]gaggcaagagaatggcgtgaacccaggaggcggagcttgcagtgagctgagatcgcgccactgcactccagcctgggtgacagagcaagactgtctcaaaaaaaaaaaaaatacaaaaattagccgagcatggtggcgtgtgcctgtaatcccagctactcaggaggttgaggcaggagaatcgcttgaagctgggaggcagaggttgcagtgagccaatatcgagccattgcattccagcctgggcgacagaatgagaccctgtctaaaaaaaaaaaaaaaaatcctttgctcttgaaaggaaacgtatcacagaatttggggattaattttcaaaccaccacaggtggggagaggaagagagacacagagttgtggagagatggacccttaaagacttgggaggggccgggtgcagtggcttatatctgtaattccagtgctttgggaagctgaggcaggaggatcacttgagcccaggagtttgagaccagcctggacaacacaatgagaacccatctcagcaaaaaaaaaaaaaaaaattttttttttttgagacagagtctagcaccattaccgagactggagtgcagtgatgcaatctcagctcactgcagcctctgcctcctgggttcaagcgattctcccgcctcagcctcccaagtagctaggattacaggagcctgccaccaagcctggctaatattttgtatttttagtagagacagggtttcactatgttggccaggctggtctcgaactcctgacctcatgatccttctgcctcggtctcccaaaatgctgggattacaggtgtgagccaccgtgcctggcctctgcaaaaaattttaaaaaccttgtcaggcatggcagtgcacagttgtagtcccagctacttgggaggctgaggtgaaaggatgacttgagctcaggaggtcgaggctgcagtgagccaagatcacagcattgtactccagcctgggcaacacagcaagacactatctccaacaacaacaaaaaagttaaggatcttgagacgcaatcatcctgcattatctgggtagactctaaatccaatgacaaatgtccttataagagaaaaaaagccatagggagattgggagaaggccgtgtgaagatcgaggcagaggttggaatgaggcagccacaagccaaggaatgccaggagccaccaggagctggaagaggcatgaaacattcgcccctggagtctgtggagggagtatggccttgccaacaccttcattttggacttctgaccccgagagctgtgagacaatacatttctgttgtgataagccatcatgtttgtggtcattttttgtgacagccagcctggggctggggagaaattaagacatggaacctggctgggcgcgatgattcacacctgcaatcccagcactttgggaggctgaggcaggcggactgcttgggctcaggagttcgagaccagcctgggcaacatggcgaaactccatctctatttgtatttagtaaaatttaaaaagaaagaaagaaagaaagacatggagtccgacagaggcagaggcaatgaaggaactagagctatacagaaagtgaaaggctgactgatactgcaagaagagcagactctacctaaaatgtagggctttcctcctccaggaagccttccctgaccgcccccccccccccaggctgggtcagtgcttgctgtgaacattcacaatgtcctgtgctacctccatgagagcatacatcttgttagaaagggactgtgtccccatgtgttccaccggagggcccaagcctgacccgtctctgagtccccagcctcactgcacacagagcctggtgtacggggtcctcaggagagaactcaggcattattgaatgaaaccatgctcatgatgtctttccctggagagtctgccagttcccatgtgcctgggtgacactcgggttttctgcagtgcccatggagggccttgcctcctccaggacgtcttccctgaactgcaagacatggccaggtgcctcttctaggctcccacagtgccctgcgctgcctccattgttgaatatcctaccaaatctcattgtaccaaggtctccctcctaccccaccctcccagactaggcaagtccctagtccgactcaggtcagggtgtcagaattttccagggagaccacaggagaatatgttgaatgaataaataagtgagtgaatgaaataaaaacacagggactgtggcactgagagacaggtgagaaaataatgtttttgtatagggcttaagaggaaggctttggccgggtgtggctcccgcctgtaatcccagcactttgggaggctg[133 bp omitted]gctgaggcaggagaacctgtgaggcagagcttgcagtgagccgagatagcgccactgcactccagcctgggtgacagagcgagattttgtctttaaaaaaaaaaaaaaaaaaaaaaaaaagaggaaggcttcctggtcctggtgtgatctggtgtgttagaacatttgactttcttttttttttttttttttttttttgtgaggcagagtcattctgtcacccaggctggagcacagtggtggcagagtctcatgatctcagctcactgtaacctccaccttagggttcaagcgattctcctgcctcagtctcccaagtagctgggattacaggggcccaccaccacgcccagctaatctttgtatttttagtagagacggagtttcaccatgttggccaggctggtcgctggtcttgaattcctgacctcaggttatctgcccaccttggcctcccaaagtgctgggattacaggtgtgagtcaccgtgcctggccaacatttaacttcctgactatctccataatcctaaccagtgctcaggatgcatcttttcccctcaagtcctccccacagcctccttctcagcttctcccccttccagtttccctccccttgcaatccatgccccacagatcccagagggttttatttttatttttatttttttttgagatggggttttgctttgtcacccaggctggaatgcaatggcgtgatcacagctcactgcaacctcaacttcctgggttcaagtgatcctctcatctcaacctcccaagtagctggtactacaggtgtgtgccaccacacccagctattttttaatttttctttttaaactgtatttacttatttatttatttatttaaacagggtcttgctctgtcacccaggctggagtgcagtgatgtgatcatagctcactcccaggctccagggatcctcttgcctcagcctcccaagtagctggggccacaggtgcatatcacacacccagctaatttctgtttttttgttttgttttgtttttgtttttgtagagacaaggtttcaccgtattgcccacactagtaattttttttttttttttttttgagacagggtttcgatcttgttgcccaggctggagtgcaatggtacgatatcggcttgccgcaacctccgccttctgggttcaagcgattctcctgcctcagcctcccgagtagctgggattacagacatgcgccaccacacccggctgatttcgtatttttagtagagacaggatttctccatgttggtcaggctggtctcgaactcctgacctcaggtgatccgcccgccttggccttccaaagtgctaggattataggcgtgagccaccgcgccaggccaacacactagtcattttttatttttttgtagcgatagaggtctcactatgctggctgggctggtcttgaactcctggcctcaagcagtcctcccaccttggcctcccaaagtgctgggattacaggcgagagccaccctgagtggttgtgttacattcagagtggaccctgcctctcccacggctcccctgcacctctggacagagtccccctcctcagcctttcttgtcgtgaccagattcttctaatgtccttgaagatccacctgtgagagaagttttctgacctgtaggctgggtttggggtactctctgggctcccccagtgagctgagccacctcaatgatgatgatgattgcccgtatcactctgttttaacacggtttgtctctcacacaaagctgattctgcccctcccctgctcacagacctcccatggctcctcagtgccctgggggaaaaaaacccaggtcctcagcctggtctgagagaacccacatgccctggccacccccagtccccagcctcatctcttctctcaccacagagacctcctgccctgggatctttgccaaactgtttcctctaactgggctccctttctcccttctctgctgggcaaattcctactcagacttctgcacacttcaggagtcccctcctccaagaagccatctggcaatgccacgaggtgggcaggggcctcctcagagctctggaagccacctgtgctgcctccattatagcgcaaagacagactgggctcggtgcccagagggggagggaacgaccaggccggaggtgggtcccagatgtggatttcatgcctattcgtctcgggtgctgggaacaaagtttgggtcatgaggaacatatggggcctgctctgcaccatgctttcatctcctatctccccagcccctgagtgggaggcggcagcgccaggcctctacaggcctgggtggttcccacagcccctcttggcctcctcactgctatctctttgccttcaactcccactgcccctgggagcctagaaaaatcctccttgatctatactctcgccttctgggttccagtctcctggaggaggtgtggactgtggactctgggtgtttaaattttatatatatatatatatatatatagagagagagagagagagagagagagaaagaaagaaagagagagagagagagagacaagagtcttgctctgttgccaggctggagtgcagtggcgcaattttggctcactgcaacctccacctcctgggttcaagcgattctcctgcctcagcctctagagtagctgggactacagctgtgcaccaccatgcctagctaatttttcttctttttctttctttcttttttttttttttttttgttgttgttgagaagaagtcttgctctgtcgcccaggctggagtgtagtggtgtgatctcagctcactgcaacccacctcccaggttcaagcaattctcctgtctcagcctcccgaggagctgggactacaggcgcacgccaccacacccagctactttttgtatttttagtagagacagggtttcaccatgttggtgaggctggtctcgaactcctgacctcaggtgatctgcccacctcggccctccaaagtgctaggattacaggcatgaaccaccgtgcccagcctattttttctgtgtttagtagagacggggtttcaccat[132 bp omitted]cagtggctcacgcctggtgatgggattacccagcactttgggaggctgaggcaagaggattgcttgagctcaggagttcaaagccagcctgggcaacagcaaaaccttgcctctatttaaaaaaaaataaaaacaaaaaaaaacctagcctggtggcttgcgcctgtagtcctagctacttgggaggctgaggcaggaggatcccttgagcctgggaggttgaggctgcattgggctgcaattgtgtcactgcattcctgcctggaagacagagtgagaccctatctcaaaataaataaataaataataaactcatacagctgtcagtctgcactaggcactgttctaagcccattatatatattaactcatttaatcctcaaaacgtaccctgtagattattttctattattttattatcatcctcatattatagatgagaaaactgagcgatgtggctcagcagggctgggatttgtggttttgttgtttgttttttgttttttttttttttgagatggggtctcgctgtgttgcccaagctggagagcagtggcatgatctcggctcactgcaacctccacctcctcgatccaagcgattctcctgcctcagcctcccgagtagctgggattacaggtgtgcaccaccgggcctggctaattttggggggatttttttgtttttgttttgttttgtttttttctgttttttgtttgtttgttttggctttttgtttgtttttttctgtctagcggaggttgcagtgagccgagatcatgccactatactccagcctgggcaacagagcgagaatgtctcaaaacaaacaaacaaacaagagaccttgagatggggaagagattattctggattatctgggtggccccatctcccatccaagaactaacagggtctgaccctgcttagcttctgagatcagacaagatcgggttcattcagggtggtatggcggtagaccgggtgcccctcgtctaattacaggagtccttaaaagcagagaacctttcccagccatggtcagaaagagatgtgaggatagaagaggcaggaaaaatctgaaatgtgaaagggactcgacctgtcgtggttggccgtgaagatggaaaaaggggtcatgaatcaggcaatgtgggtggcctctagaaactgggaatagaaaggaaacagattctctcttagaggctccagatggaatgcagcctcgttagcaccttgattttagcccagtgaaacccatgtgaggcttttgatctgtagcgtgtaagatgataaatttgtgttgtttcagctgctgagtttatggtaatttgttatggcagtaacaggaaaggaattcgacagttctctgttactgagcacgtgagggaattctacgtccccaccttcatacaactgagtggaaccacatgagtaatcccgatgaatgagctgtgattggaagggccgggagtcgttcctggaccaaagctgttttgcttgcataagaccattcagtgcttttcctctttccttgtctcagtgatcaaggatgccctgggttacgggtggtgctacaaggtggtgaacatctctcagcctgggtccttgactgtgtggaaaaccaacctttgccaacttgcatggaacatgtatatgaacaagaaagaaactttgtgttttctttttctttttcttttctttctttcttcttcttcttttttttttttttttttttttgagacaaggtcttgctctgtcaaccagtttggagtattgtggcccaatcatagttccctgcagtctggacctcctggactcaaacaattctcctgcctcagcctcccaagtatgaggactacaggcaggcacacaccacaatgcccagctaatttttgtattttttgtagagatggagtatcaccatggtgcccacgctggtctagacctgggctcaagtgatcaccagcctcagcctcctaaagtgctgagattacaggcatgagccaccacacccagccagaactcaataaactccatagagccaacagagctagcctaagctgcctaatggaaggtctcaatgaagtaaggaaactggcttgccataacatgaaaaggtgtgttccaggaagagaacagcaagtgcaaaggtcctggagcagagtgtgcttttttttttcctttgagacggagtcttgctctattgcccaggctggagtgcagtggtgtgatctcagctcactgcaagccccacctccctggttcacgccattctcctgcctcagcctccagagtagctgggactacaggcgcccatcacc[186 bp omitted]ggctgcagtgatgtgaatgaggaagacttataagaggtgaggtcggtgatgtggtggaggtagatcatgcagggctttgtggggcagggcagggactttgggttttattttgagagtgatgggaagccattcaagagtttattttttgtgttttgttttttgtttttttctgcattaaaaaatgcagaagaaaaaaaagagtttatttttagcgatggggtctcactctgttgcccaggttggagtgcggtgccacgatcatagctcactgcagcctccgactcctggattcaagcaatcctctgcctcagcctcccaagtagctgggactacaggtatgcaccaccatgtccagctaattttttttttttttttgtagagatggggttttgctatgttaccacgtttgctggtcttgaactcctggcttcaagtgattcccacctcagcttcccaaagtgctggggttaccggcatgagccaccatgtctgtcctgacatgatttaaagtgatcatcctggcttccatgtgaagaagactttcagggggtagtgatgagagtagtgtggggactattgtaataatccggacgagcagtgatggtggtttggacaaaggtggtagcaacagagatggtaaaaatggttgaattatgggagatattttgtggatgtggacaggatttgctcatggattggatatgaaggtggagtatgggggcagtgaatgcccaactgaattggcttcaagagaggatgaaaataacaaagataaggaatatagt[134 bp omitted]catggggaaacccgtctctactaaaaatacaaaaattagccgagcatggtggctcgtgcctgtgatcccagctactcaggagactgaggcaggagaatcgcttgaacctgggaggcggagactgcagtgagccaagatcactccactgcactccagcctgggtgacacagtgagactccatctcagaaaaaaaaaaaaaaaagaaagaaagaaaagaaagaaaagaaaagaaaagaaaatcccttaagactggtcgcagttgctcatgcctgtaatcccaacgctttgggaggctgaggcaggaggattgcttgagctcagggggtcgagaccagcctgggcatcatagtgagaccccatctctactaaaaaagaaaagaaaagaaaatcccttaaaagactcctacttcagagatgaccccaccctgggttcatcgggaggctaagggcaggttctcccagattatgtaacattttattggtggcatgggggtcaaatagtctccctggaggcaatttcttgcctttttccatctaaccaagagcaaacccagaacgtttgctggaaggcacctttctccctacctggtatcctgtgacatcatggcatatcctgactccccattggctgagaggcccagctttctctcagagaaggaaattattaggcaacacaaatctgactagcacccagttacatcataggagtgtgcttattgtattggccactttgttccaggtccaaatggacctcaggacagcgcggtggctcacgcctataaacccaccactttggcaggccaaggtggaaggatcacttgagcccaggagttcgagaccagcctgggcaacatagcgagacctcgtctctaccaacaacaaaattagccaggcatggtggcctgcgcctgtggtcccggctacttgagaggctgaggtgggaggattgcttgagcccagtaggtcaaggctgcagtgagctaccatagagccactgcactccagcctgggcaacagagtgagacccagtctcaaaaaactaaataattaaaataaaataaaataaaaaattttggctgggcacagtggcttatgcctgtaatcccagcactttgggaggcctaggtgggcggatcacctgaggtcaggagttcgagaccagcctgagcaatgtggtgaaaccccatctctactaaaaatacaaaattagccaggcgtggtggcacgcacctgtagtcccagctatttgggaggctgaggcaggagaactgcttgaaccggggaggtggaggttgcagtgagccgagatcatgccattgcactccagcctgggcaacaagagcaaaactccatctcaaaaaaataagtaagtaaatataactataaataaaataatttttttaaaaaagagttagaaacaaacaaatggaccttaaatcacatcccttcctctaagactccctgagtaccccctcagtgactctcctgaaaagatcacccaaatttgagattatgttgtttgctgtgggtgcaggggcaggggtcagggtggcaaggaaggtcccaggctgtggcaaccttccattccgtggtacttaccgcttcctgccttttgcgcccctcccctctggcgtgcaggccaattgttgagtgggaatacaattctgcttagcaccaagttatgtcataccactctgtggcttccgattggctattctttcaaaaatgagtcactcaaagtatctcaattcctttctcagagcctatcctgaggcccatcagaaaccaacagttcctacgtctggaattttctagaaatctggaactgctgtccctccctttgtgagatttcccgccttttccaaccaagccccgcccattggccttcggcctatcgtcaggcaacaccaatctgactagcacccaatgacgtcataagagcgttcttattggattggccactttgtcagggtcccgttgtgctgtggtcctaacttcagctccgcgtattgattcaaggccttgttcgcttccctctagagagtgtgccagcatcgatcaggggtctgtagacaaaaattcccaaagatttgagactttattgggggaaacagatcactggcggggaataagccacaggccaaaggaggaaatgttgggaccagaagtcccgcttgccgccttttgctaaaagttccgcacgcctgctcggcgtgggcgcaagcatagtgtcgtcggggctctgcgacgtctgattggctctctgcagtgcaccgtcgaggtagaaggctcagctcctagtcgctcccaaattactttgttggtgctcgaggcagccccatctcacgtctagtgctccggcctgggactgggtgtgggtgcccgcacgccgcggcagcctccggcgcgctcctcctgctgcagccgcttcaggggccgggcccagcgcggcctccatggcagcgcgaggccgtggcggtcgaggatgaggcgcgtggggtcggggtcgcccacggcgctgcccagcagcaggtagtcggtgcctggctgcaggcgcaggcagccgcaggtcaggtcggcgcggggcacccaggcgtcctggtcgccgcgtcgcacgggctgcgcccgctgcttgtaaacggccagcacgcgcacggccagccgctgccatgccgggcccgccgcctcggacgctagcacctgcgcgcggagaactgtggggaggggagatgtcagcccaggtcgtggggagcttccagggtacctctgggtcccgtggggtcagtcacagtgggcaggagcccgagaccggtgggtgggcttctggtatcgcagtggggagagaaaccttgaaccttggagagtttgaccctaaatcgtgaggggtagagcctgctggaggaaacatctttgagataaggagttaaactatagtaggtggggctggggacagggcagaagaggcaggtccagggtctctaatgcagtggagtcagaaggtatcaatggtggaattcttgggaaggaggggtcacattgccgggggaggggctctgggataaatttcgaggaccagaagaaggaagagactggtccctggaatgtgagggctgaggtcatactgatagtgattcagaaaaacataaattttttttttgagacggaatcttactctattgcccagtctggagtgcagtggtgtgatctcaactcactgcagcctctgcctcccaggttgaagtgattcttgtgcctcagctgggtttacaggatcctgccaccacgcctggctaatttttgtatttttagtagagatggagtttcaccatgttggccaggctggtctcgaactcctgacctcaagtgatccgcccacctcggcccccacaaagtgctgggattattagcatgagccaccgcgcccggccagaaaaatgcactttctgagaggctgggtgggactctgactagccagctgggtctgcggggcaggagatccctgtggaaggtggggaaaatctttccacctgtgaaggcctagaacactagtgaccagatgaggttcctgagggagaagtctgcggtcctatacattgagagaaatagctggcgttggtctagatttgttggctgggccgaactcctgagtgtcttaagagagctgaatagcctgaggtcatagaccccaaggtcatggagcaggtgtggactggggattagggaaccgtgggacaagtctttatgggaagtggggctaaggctcaaatatctgggaccatgaagggaagcagaaagggtctctgagatagggaggacagggcaagagttcattccactcaaccagttcccctatctcttccatccctcagagatgtcaggctgaaggagatgatgaaactctgtaagccgaagaacatggggaaagaggagacacaggaaggtagtgaatgccccctccccactcccctccccatttgtcttctgccccatcaatttctagatcaggaaggggtttggaatccaacactccttcccatttaagatgagaaagtggaaggccagaaagggggtggcttagaagcagtcatcagaaccagctgtgtagccttcagctgtctgtctccccagcactcaccatggtcctgctggcagtacctccgaaggctcatgtgtaccctggtgtccgacatattgcagtagttttgacactgagggtctggggagggtcaggctgtctgcagtgggctcctggggcctagaccacagccttctgcccctgcccatccctccgttccatcttgatggccagctggggtacccaaacctttgggactgggctcaatgggtgacccatgtatccccatctggggacccagtcagcccatcctcattcccacttgccactcagggacctccgtgccagactgtcttaccagagctataagcaccaggagtagtggcaagggtggttgttgcctctggaattcctgtgagaccaaaggagaaattaacctcttagtcatttcccccaggatcccctcgcccctgccccgggaatccaggcacccaaactcttaagtgtttattcctttaggactcaagagtgcaagcatcccttgccttcaggccccaagcctccttttcctcaagagtccagaatttcagtccctgcttatccgagggcccagagtccagcctccagccttgggctcccaattcccaaggccccagccctcactgcagctgtgcactggagacctgggatgtctccttcccgctctactcaggcttgtggcctggcccctcaagacttacgctggcagggcatcctgggggagcggctctgctggtagccagggccacagcggttgcaggtcaggcctgtgacccctaacttgcaggtgcactgcccactggtctggttgcaggttcctcctgttgccccaatagggtggcactggcaggctacatgagcagaggagctgggggcatggggtatcagggccccagatgcccctcccaattccacagtgcctcctccctcagcctggggagtccaggcccccagcccctcttccctcagacccaggagtccaggcccccagcccctcctccctcaggcccagagtccaggcccccagcccctcctccctcagatccaggaatccaggcccccagcccctcctccctcagccccaggagtccagccctacctctgctccccccaggcctgtctgcaggccacactcacctctgcaggccctgcggctgaagataggctggctagggtccctccagaacccaggttggcagtagtggcagtgccgcccagctgtgtggtggcggcaccgctcacaaacacccccactccggccgcccgacagtctgaacagctcagagttgaaccggcagcgtcgggcgtgctggttgcaggagcaggctaggagcaaaatggggtgggggcgcatcagggccgagtgtgctgctccccagtcctcagctttcttcccatggccctgccctcatgaaaggaagccgtgagtgtccaaggtagaagagaatgcctgggtcccaggacatctctattattatcttttttttttgagacggagactcactctgtcacccaggctggagtgcagtggcgcgacctcagctcactgcaacctccacttcccaggttcaagcgattctcctgcctcagcctccc[136 bp omitted]gcctgtaatcccagcactttgggaggccaaggtaggtggatcacctgaggtcaggagttcgagacccacatggccaacatggcgaaaacccatctctactaaaaataaaaaaattagttggctgtgatggcttgtgcctgtagtcccagctactcgggaggctgaggcaggagaatctcctgaacccgggaggtggaggttgcagtgagccaagattgcaccactgcactccagcctgggcaaaggagcaagactccatctcaaaaaaaaaaaaaaaaggtacattggactggagctggtaagtccggggggactcatgaacctcctgaacatctgtgaaactgggcctctaaagagtaggctgcatccaggcacgatggctcgtgcctgtaatcctagcactttgggaggccaaggtgggcagatcacctgaggttaggagttcaaaaccagcctggccagcgtggtgaaaccgtctctactaaaaatacaaaaattagctgggcgtggtggcacgcgcctgtaatcccaggtactcaggaggctgaggcaggagaattgcttgaacccaggaggtggaggttgcagtgagccgagatcacgccactgcactccagccagggtgacagagcaagactccatctcagaaaaaaaaaaaacaaaaagagtgggctatggcctgtggaatcagacccttttagccttgtcggtctctctgaccgtattccctggacaggtaatttatcccttctgtagtttgattggctgtgaaatggcatttataatgtttacttgaggcttaaatgagataaagtggataaaaagtgcatagcccaggcctggcggagagcaagtacttggctgtctagcattcgtacgtgcaggacaccctgcactgtgtttgatgtatttcatctccacaagggctctgtgaggctggcactattatcatccccattttacagagggagaaagctgaggcacagagaggtacagctagcgggtagttggaggcaggacttaaacacaggtcttctagcttgacagtctgagctcttagctcactccagtaatacacagctcccgtgaggattatttagcatgtgcattatcctgggagcgtttgtcaggtgttttaaggtggctctcaaaccttactgctcatcagaattaccagggaaatgttttgttgttgtttttattaaaaatacattaacagggcatagtggcccacacctgtaagtcccagctactctagaggctgaggtgggaggatcacttgagcctgggagttggaggctgcagtgagttatgattgcaccactgcactccagcctgggcaacagagtgagaccttgtctttaaaaaagaagcaaaaatccaaaacaacaacaaaagccagattgcaaggctcctccctaggctttctgatgggcccaaggatctgtatttcca[132 bp omitted]acagcctccaactcctgggctcaagggatcttcccacctcagcctcctcggtagctgggtccacaggcatgcaccaccacaccaggctactttaaaattttttttttaaagacggggactcattatgtctcccaggctcatggacactctttgaagagacttggactgcagggtgttttgacactaagaggtttgagagccctggactggcaggtccctgagagcccggaagagttgtgggataatcagggagctcagacggctgcatgttcttggaaaaacaactccccctctcccagcctctgttttctccctgtccagagagaatccagatccctctctcccagggtttttgtgggcattcaaagtggcaaagctattcagatgatcagtgagttgagtcaggttttggattctttctgacccaagggtaatcgttttgcctcacttcccctgtggagaactcagatgagggagaggagatgcagaccaggatgtctgtgaagcccatagctctgccacaggcattagtctcacctggccaccctgacctttctccactgcagcattgtcagtctcttacccgggtttggagggcactgccctgctcagtctggggggatgtggtgaccctcaggacagcctccccagcgcccaggccctgtccaggcccaggatgaaggctgcctcatcctcaggcctggtgagtctcacccctcactcccctgcttaggtaaaagatttggccaaagaatggggatggtctgtaagttagcccatgtgatcttcatgtatgaagaaatagaggggcagaggccgggcgcggtggctcacgcctgtaatcccaacattttgggaggccaaggctggcagatcacctgaggtcaggagtttgagaccaacctggccaacatggcgaaacctcatctctactagaaatacaaaattagccgggcgtggtggcacacacctgtaatcccagctactcgggaggctgagataagagaatggcttgaaccccagaggcagaggctacagtgagccgagatggcgccactgcactccagcctgggtgacagagcaagactccatctcaaaagaaaaaaaaaagaaatagagggccgggaggcaaagcgcatgggaggtggagagggaaggccagggtacacttgcacacgtgtgtatatgtctgtgtctgttggtagagttacctcccaggacctcagaccctgtaccaagtgtctcaggctggaggagggagggggtcagggccggaaggagctgacaccggctgtctctgaggaggggctgttggagggaggtagggaaggcctggtctggaagcacctgtgggaaagagggcatcgcatgggacattcctggggggcccctgtccagctggatggagcagcggattgttgcagcatctaggaactcagggctccctgggttaaatcccttgctggcaatgagacttagggcaagtgacctctctttgagcctcaccttcctcagctggggagtggcgactttggcaggtgctcaggaagccgttcctttgtgccaggtaccacattgggctttatttaaaggctttatgtgtattaatgcatttaattttcactacagcctgtaaaggatgtgctgttactatccccaatctatggtggaggaaactggggcaccaaaagattaggtcacttgcccaaggtctcacagcaggtaagcagaggagctgggattcaagcccaaatagtctggctgccaggccaccaaggccgtgctcctgtctgttgcctcttgtctgccacgtggtgtgacagtacccagcaggagcctggcagggacaggctgagaccccagaacttggcttcctgagctcagatcctggccctgccacacgcagccactgtgtgtccttgtgcaggggacttctgaactctaggcctgagtctcctcatctgtaaaatgggcctgatgacatccctgcctggcacacgtaggtgactgataaatatgtgtttaatgaccgaatactttccccctgtggttggtttgaggagtcaggtaccatccagctgtcctgttcccctacaactgttcaataaatattacccaagtacctgcatccagccaggccctgggatgggtgctcggaaactgttattacatcatcatcaccaccaccatcatcatcaccactatcaccaccatcatcaccactatcaccatcaccatcatcaccactatcaccaccatcatcaccactatcactatcatcaccaccaccatcaccatcaccaccaccaccactatcaccatcatcaccaccaccatcaccactatcaccatcatcaccaccaccaccatcatcatatcaccatcatcaccaccatcaccaccaccaccatcaccaccatgaccaccatcatcaccaccatcaccatcaccaccaccaccaccacgaccatcatcaccaccaccaccatcaccaccaccacgaccatcatcaccaccaccaccatcaccaccaccatcaccaccaccaccatcaccaccaccatcaccaccaccaccatcaccaccaccaccatcaccaccaccatcaccaccaccaccatcaccaccaccatcaccaccaccaccatcaccaccaccatcaccaccatcaccaccaccaccaccatcaccaccatgaccaccatcatcaccaccatcaccaccatcaccatcaccaccaccacgaccatcatcaccaccaccaccatcaccaccaccatcaccaccaccaccatcaccaccaccatcaccaccatcaccaccacgaccaccatcaccaccaccaccatcatcaccaccatcaccaccaccagtcatcaccatcaccaccaccaacaccaccaccatcaccatcatcaccaccatcaccaccaccatcatcaccatcaccaccatcaccaccaccaccaccatcaccatcaccaccaccatcaccatcgtcaccactaccatcaccatcacaccaccaccatcaccatcaccaccatcatcaccatcaccaccaccaccatcaccatcaccaccactaccatcaccaccaccatcaccatcatcaccactaccatcaccatcaccaccaccatcaccaccaccaccatcaccatcatcaccactaccatcaccatcaccaccaccatcaccatcaccaccatcatcaccatcatcaccaccaccatcaccatcaccaccatcatcaccaccaccatcaccaccacagtcatcaccattatcaccaccaccatcaccaccatcatcaccattaccaccatcacaccatcatcatcatcatcaccatcatcacaggctgatgagtgttggggagaggctgagcccctcatgagcagacaggcccatgtgtggctgagatacaggactggctgcagggaggaggtatgaggggaccgagtctgagactggggtgagaggcaaggagcacccagttccagcgagggaagggaacatcctgctcccgtagggacaaaggacccagtggcaggcaggcaaaggcagggagagtgaggggcgcaggactcacgtaggcaagggtgggggtgccggggcgtggcaggccgccagggccagtctcgatgggacgggcggcagctctcgcaccccgggccagtggtatggtggcggcagtggcagcgggggggccgggcacgggcggcacagcgggcagcgtggccatgacactggcagcggcctctcagcccagctgccgctagcccggcctggcccccaaactccacacggaggtggctggccgccacagtggccttaggacctggtgtggagtggaaggtcaccctttcagggccccctaaggccccaggccaggcgggcctgtgccacagcagcctccagggaccccctgaggcccaggcagcagacaggatgagggctgggggtcctggggtacagaagcgcaagctgacagatgtcaggaggaaggggccacccagggccaaagtcaggctgccattgcaggtttccctggcgccaaggtggtttcctggggacagggcacaggcctgagggcaggaggccgccacggcagccagctgtgtcactggcgggaggcagaattgggggcggccctgtggatcgtagcatgggtccgcagtggcctggcccaggaggagcaggagggcaaaggtcacgggcatggtcacagcagagccagcacctggagggaagagaggtggctgggctggggatctcagccgcagcctctacccctcctggaggtgtcctgtggaactggggcattccacccccaacccgtccaggccccctccccggctgcatggaagcgaggaaaatagttccatctggggagaattactgtttacataacccaaaggggaaagaacgcagacaaaatcgagaattttgcctgaactaatccgtagcttaacaccccagagttatccgtcagtgtcgaggggcagggggccctggggagcggtgagcggctggagcagaggggctggccaaggccagcagacgtggaaacctagagagggacacagagacaagcagggctgggcaggagagggggcttagggacagatgaagactcagtcacaaagaaatagaggacaggacagaggcagagagaggacagtcagcctaggggaggcgctcggcacagagaagttgctgcaaagacagaggaacagacaggaggctgagaggctgagacagaggccaggcacccagaggccacagggagctgggagactgaggctcggactgcctgggggctgggataggtgggcaggtgggctcagagacacccagcctggcaggccctggggaggggagggaaggggacaggctaggggtgtctggcgggggatcagaagtgagagaccgaggcccaggcctgcagggatcagagccattgcctttcccacatggggccctaaccttgttctccacaccctgggcacggaaggggattatcaccaaacaacccagcctccctgccacccgcccacccacccccagcgccccacccttaaccctttcccacccgagtgcaaagcccagagagctgagctgaggaaagggatgctgggagctggaacctgggtggctctggggcttgggagcgggacagtgggatccccatggggtcaggggaagcagacacctgggttcccttcagaactcagggtgtggggaccggaagttagcgttctgggactttctgctcacctcaaccctgccctctattctgggcctcagggcctggagaccagagtccccacattctccacccatccagagttccccagagcagatgggggaacagatgttgggggcggtgggtaatgaggaggagagaggcaggaaggcaggagctgggacagggtggggtgccagatgccagggcgcccgtgggggcagaagcccagaccctaggaatggcaggagctgggaaggactggactctgaaatgcccccactttccccttccagggccagcagcctctggtgaggagctcactgtggactgggggcctcggagcctttccaggcccttggctctgaatctgcgcccaggaatgtccctgggctgggcatctctggggcaccctggcggttgaggtgggccacacctgccccagcctggcctcactgcccatgtccccactgctgttggccacatgcagacgctgcctcccctggcccagatgacaggcctcgccctccgccctcccaaggagcctggcgccattttgcacccactcaggtggcagccgcctgcctggccctcagcagcatcctgttaagggccagtcccccatgtcccctttctctctggatagttgctggatagttcagggggtggcaccctctggcccttagcaccttgaggaaccaggctgtgagttccctagtgttcctgggggatccagaaaccagtcgtggcccacagagagcccatacccctctttaagaaagagtccagccatgctcccagcagactcataggaggcctgcctgggcggcctggggtccatctgggacccaggcttcctttccctggctcttggcatgcaccccccaacccgagccctgaggccccgacattggccaaacctgcactcaagaagagagcgtcctgcagccagttccccgcaggctcttcctccaagctgtggcgcggtgggctctcaggagggagtggcgtggctgttctcaggccccaggctagtggggtttctgggctgggcgggggctcagagcagagcccgcagaatctaacaccgccacccccctcccaccccaatccctcaccaaccgcagccacgctatccccacagggacccctgccagccaggccacccgcaacggtgtgggacgtgagtgccgttgcccccggcggtccagcagcaggacagccccgagcagcctggcctaggaggctcaccgcaggtaggacgggaggctgtcagtcgggggtcccgctccatcccactccacccctgcccactggctcagccccgccttgtggtggccgccatcgcgatcgggcaggggctgacctttgggagacaatcgctgttggaaactttgctcagcccctgcctctggctgcgtgaccccaagccagcccctcctcctcctctctggaaccttttgtcagctgtgggttcaccgagccttaaggtcagtaaaatctgtgctcttggaaggttcagaccagcccctggaattcaaaagacctcagtcgctttctaagatggtggggaaggcgacaaatgagctgagaacacctgggccccagtgtttctcatgcggcagagggagaaggcggggacccccggggtgcgggggaccaagctcaaaagcacctccccagtgccgctggtgtcctgcgagtcctcagtgctttcatcgtgacattttcatgcgaatgttgctgtctgttctattccatctccgaatgggttgactagaaaaataatgttttctgtcacttcccgctgagaaaagcaagggcctcatggagttggggcgcggcacctgctgccctgggtggccccagcgtttatcgtggtgtagcgtgggcccaatcctgacaggcttgggacccactgccccaggcccgcccccagggggtgcgagggcacagcaaaggcgaccctcgactctggacccttaggtaccacgttggagggggccagatttggcaggagcaggacagggacatcggatttgaaagaagggagtcactccgaaagctgggaggtgcatcagctgcaggaggatggaatggggctgagacgccccccatcagagggggcatgtcagagctgggggcccaggctgtgtgagtcagagtggaacttcgggattcaggcgcaggtccctccgctgaccctgcctgagctccccctgtatgggactttgccgggggttcgcgctgggaacacagacccctgccccatcaggctcagtgtccagagagggagggggagaccccagcagcgcaggtccttctgtgctctaggttgttggaaggtgccaagtgccttggagcaaagcaagtggggggggcggccacgggggcccggggattgcagatgtaagtggggtgatgcggaggggcatttgtgctgagcccaccgccagcacagaacccagctttgctgccacacaaaactgaggaagaaggcttaggtctcgctgcgtcttcctccccacctgggcgaagtctcaagctccggctcctggagggaagcttttgttccttgcagcttgagctgcctgagttgatgggcgcccctgcgggtgcccgggggcaggcggggaagaacagacggagctgccacagccgagcacatagtgccccaagctgggaaggagactgttttttttgttggggagagttctttaagggctggagaccttcaccctcacagcttctacagaaggccaggcctgcccaaggcacatctctgaggtgggttcaacccagagagaacctcagtgctgggctcacacagacctctaacccctgccttggtggcccagatataacggagtctccacgaggcagggcaggtcacccgcaggagttactgggcattgtgtggctgggtagggcctgccctcccggacatgttcaaaaaggccaggatggtaaccccagccatactgcctgggttcaaatccacctctgtcctagctgtgtgaccgagaacaagcttcttaacctctctgtgccttcatttcctcatctgttaaatgaggaagaaagaatggaccttcctcatggtgggcggagggggtcatgaggactgaatgagctgacatgcccacgggttcttatctgagctctctgggaaagtcgtgttccggaaccttctgcttcctggccctgttgtcggatgcatagtacgtacgtgacatggcatccatggtaggtctgggccgcatcacattgtcaaacatgttatgttttaggcagcagagcacatgggtgttcacagtaagagaagtaaagtctgcaaatagccacatgaccctcctccaagccagggttgtccccagatgagttcagtccaggttggcgtttgccgctccccctgaggaaaatggctgacaaggaatcgcggaccaggacagccagccccgtgatgggcctgcccgccagcaccctcgcagcctcggccttggctggtgcttttctgcggctttctggttgtctaggctgagaacagccacaagagggagcacctgagattccaggagaagccagagcagccgcggtacccactgcttgatctgcagggcctgggggaaaatgcagacacaggaccccttgtttagaatttatgaaggattttaagacggcaacaccagatcattaaagcaagcgtggggcctgtctcagcgcaactgcacgagtcacacaaaatgaaggcggaccccgcggggggcacccttgtcctgagctggtttcccttggccagtgacccaggctcctgtccctgccctgcacccccactgaccccagctctagccttgggacctgcctgggggctccagctgggctcagagctcagctccttctccgtggggcaggaccctgagttgagtggatggcaagatcatgtttgggacacagttttcaccagctcagtgaaaaaaggcttgggcagatttaattcactttttgcaaactaaagcagcaccaggagcatttttcttaggccttaggccagctggccttgctggggacccacacgagactttcaaggagggccccagagtgttcaggcttctcagaagggtcagatgaaccaaatgaggagccctggaatagaggaggatgacagctgaagaggcctggagggccccagattgttcaggcttctcagaagggccagatgaaccaaatgaggagccctggaatagaggaggatgacagttgaagaggcctgtaggcccccgatgtttaagaggacaggcggagggagagatggggagccgggaggggtgaggcagaagccagaagttttaggggtgagcccatgccaaccagggcttcagcaggaatggggtgggagggagggggtgaagggatgactgctgagctgtagccattggagtggccacagggaaaccataggacattggtcagaggagtggacaaggggagaagagaaagccgatcaggacatggtagaggctgggagcagaggaccttctgggagccctggggagagctggaggagactcggaaagagcagcccccggagaagggaccatccatcccacggcgaggaccgggaccgaggtccttggagcccagtcaggcccagtggtcagggctggacctggaggtgaataggtgtgggccccacggtgagatggccctgcacacccaccacaaccaaacacgacggcgagcgaggctgggaaatggggccttcccgtactgctggtggaaacggaaactggggcagccacctggcagctcccaaaacgattcaacgtagagttcaccctgtgacccagcacacaggttcgtggcagcactatttgcaacagccgaaaactggaaacaactccagtgcctatcacctgatgagtgaatacattgtggtctacctggacaatgggactttcagtcttgaaaggagtgaggcaattatctgggcgtggtggctgtacctgtagtcctacctgtagtcccagctactcgggaggctgacgcaggagaatcactgaaacccaggaggtagaagttgcagtgagccgagattgcgccattgcactccagcctgagcgacagagtgagacaccgtctcaaaaaaagaaaaagaaaagaaaggcgtgaggctgtgacacgtgctatagtgtggatggaccttgaaacacggtgccgagtgaggaagccagactcggaaggccatggagtgtgtgattgcagtcacatgaaaaatcgagaataggcaaatccataaagacagaaaggagattacttggtggggggacaaggaacagggaagattgtggggagatggttaaagggtgtgggtttttttgggaggggggctatgcaaatattcaaaaattgattgtgctggttgcacagctctgtaaatatactaaaagccattaaatcgcacaccttacgtgggtgaatggtagggtatattaattatatctcaaagtggttgccaaaaaagagctggctggacgtggtggctcacgcctgtaatctcagcactttgggaggctgaggtgagtggatcacctgaggtcaagtgttccagaccagcctggccaacatggtgaaactttgtctctactaaaaatacaaaaattagctgggcgtggtggcgggtgcctgtagtcccacctacttgggaggctgatgcaggagaatcgcttgaacccaggaggcagaggttgcagtgagccgagatcacaccactgcactccagcaagggcaacagagcaaaaactccatcataaaaaaaaaaaagaaaagaaaagaaaagaaaaaaatgaataatcataaccctacatacaaaagctaaaactggcccatgcctataatctcagtactttgggaggccaaggcaggaggattgcttgagcccaggagttcaagaccagcctgggaaacacagtgagaccccatctctacaaaaaatgtaagaattagcggggcatggtggcacatgcctgtggtgccagctactggggaggctgaggtggaaggatcccttgagcccagctgtgatcagaccactggcactccatcctaggtgacagagtgagaacctgtctcaaaaaacaaaagctgaactctccagcttgacacgatagtgcagagggaacattctcaaggcaagacatgaaagctgttagttctttaagtcctgggccagaaatggacacaatttcacttgcactatattaaagtggtcaaggcagtcatgggcccgcccagatccaagggaaagggagtccaggagtctgtggtggcttgaacccaccacacccactaatagtatcaggaaacgcttagcacttatcagtgcaggggtgtggcagccccatttcttggaggaggagaggaggagttaaataacacctccaggtcaccagcctgcagaaggcagagcctgtccatgaacttgggcccacctgtgctctttcccaaactctgcacgggcaccaaagattcttacctgttttttcctctgctggcttcctggccctgagcaccgtgcctggcattgtaataaatactctgcaagtattgattttatttatgttatttttattttttttgagacagtctcgttctgtcacccaggctggagtgcagtggcacaatctcggctcactgcaaactccacctcctgggttcaagcgattctcctgcctcagcttcctgagtagctgggattacaggcacccgccaccatgcccggctaatttttgtatttttagtggagatggggttttgccatgttggccaggctggtctcaagctcctgaccttaggtgatccgcccaccttggcctcccgaagtgctgggattacaggtgtgaaccaccgtgcccagccactgcaggtattgattttccaacacatacagggcatttcctgtgtgcgaggcactgctttacaaaatcatcacatttaatcttcaagcaaccccatgaggtagttctgtgaggtagaatcatagaaatggccgtgagtaggccaggcacggtggctcatgcctgtaatcccaccactttgggaggctgaggcgggtggatcacgaggtcaagagttcgagaccagcctggccaccatggtgaaaccccgtctctactaagaatacaaaaattagccagggttggcagtgcatgcatgtaatcccaactactcaggaggctgaggcaggagaatcgcttgaacccgggaggcggaggttgcagtgagccaagatcgtgccactgcacttcagcctgggtgacaaagcaagactccatcgccaaaaaaaaaaaaaaaaagaaatggccatgagtgtaggtaaaatcgggttaaatattggcactttcaaatagttccatctactcatccccatttaacaggtgaggaaacagactcagagaaactcagtaacttcttgttgtttttgagacagggtcttgctctgttgcccaggctggggtgcgggggcacaatcacagttgactgcagcctcaacctcctgggctcaagcaatcctcccacctcagcctcccaagtagctgggaccacaggtgcatgccaccatgcttgactaattttaaaaaaaattttttttttttgtaaagatagggtctcactttttttgctcaagctggtcttgaacttgggctcaagtgatcctcccatctcagcctcccaaagtgccaggattacaggcacaagccgctgtgctcagcgaggtgcagtaacttgactgaagtcacaaggtgctggtgaggctgggacttccagcaggaactcagcctcaggtggaaagaccccagggtctgtgctctgaggcctctcccatgcactgtggtgctcaggacagaggcttggatggattgagtgagtgaatgaatgactttggcagggggtgggtgaagagactcctgtccccccagccctgcctcctgaccatgtcctctctcctccccacagccgtcaagggattctgggccacccgcccttccttctccaccttctacttcgtctttgccatttttgtggtgtccaccatctttcactgccaccagcacctggctctggtgcctgcgccctgggcatactcagcccgtgtggtcctggcccccagacacctgccccgggaggacctgttcactatcaactccaagggccgcctggggaaccagatgggcgagtacgccacgctgtacgccctggccaagatgaacgggcggcccgccttcatcccggcccagatgcacagcaccctggcccccatcttcagaatcaccctgccggtgctgcacagcgccacggccagcaggatcccctggcagaactaccacctgaacgactggatggaggaggagtaccgccacatcccggggcgctgtgtccgcctcacgggctacccctgctcctggaccttctaccaccacctccgccaggagatcctccaggagttcaccctgcacgaccacgtgcgcgaggaggcccagaagttcctgcggggcctgcaggccaagtgggcagggcaggcgaccttcgtgggggtccacgtgcgccggggggactatgtccgtgtcatgccgcgcgtatggaagggggtgctggccgaccggctacctgcagcgggccctggactggttccgggcctgctgccgcctcccggtctttgtggtcaccagcgatgacatggcctggtgccgggagagcatcaacagctcccttggggacgtggtgttcgctggcaatggcctccagggctcacctgccaaggacttcgcactgctcacacagtgcaaccacaccatcatcaccgtgggcaccttcggggtctgggccgcgtacctcgcgggcggggacactgtctacctggccaacttcaccctgcccaactcccctttcaacgtggtctttaggccgtaagcggccttcctgccagagtgggtgggccttgcggctgaccttggacaggctggacagaacggcctctagccagccctgcatgtgcctggtcctcatcctgtgacccgaggggcagtgagtggggcgtgcggggcatggactcacggtccctcatgcagtttggatccaggcttatctacttcatagctgagtgagtttggacaactgactcaacctctgtgccttagtatgtcaaccacaaaatgcacaaaccacagaactaaacaccagtagcagctggtgggagctgagcaaattcgcttagagccagtgccttgtgaccgtgtgggaggtgtcggctgctcacatgtatgcagcacgtcaggaacactggcattgctttccaatggaaacgcagttttgccctctccttcctggcagcactggtagcacagagcccagatattttgcactcacgtcccaggacgaagccatccctgccctgaaggataggggaactcgattttctgggcaactaggaattttggctttggagttagtgggccttatcacaaaagaatgtgagggaagggccgggtgcggtggcacgcctgtaatcccagccctttgggaagccaaggctggtggatcacttgaggtcaggagttcgagaccagcctggccaacatggcgaaacccagtctctactaaaaatacaaaaagccaggcacggtggtgcgtgcccctaatcccagctactccggaggctgaagcaggaggatagcttgaattgggaagcagaggttgcagtaaaccgagatcataccactgcactccagcctgggccacagagcgagactccatcgcaaaaaaaaaaaaaaaaatagaattccagggaagacaggatttgcagggacacacctatgaggagggattcccctgcgatggacaggggaggggtttaggtgcaggtagcaccctgggcgcagggaagaaggcgtcacagtgagggcagaaaagacactcctcagatcctggaagcagcaacctgacccccaggggccactaagaccaaatcatggccatctcagcagcagcgtgtgtgacagttactggaaaaagatacctcacacctggcactgcctaacccccgagaacctaatgccactctgagaaagctcagtacgggtgcaagttggattaagtaattgcagtgcgagttttcctgtgttttattggtgtaatgctccttttggacattaaaaaaacttgacatatacaatgatcatttacatgcattaaacatttccaccaaatgtaggtgcagtggtttagaaaacattccaatcacatctctttcccatttgaaaccttttcaaggttgggtgcagtggctcatttctgtaatcccaacactttgagagctgagttggagggggatcccttgagcccaggagttcgagaccagcctgggaaacatattgaaacctcatctctacaaaaattagctgtgcctggtggcacacacccatggtcccagataatcaggaggctgaggtgggaggatcacctgagcttgggaggttgaggctgcagtgagccatgatcacaccactgtactccagcctgggcaacagaataagaccctgtctcaataaaattaaataaataaataaataaattgcttgcagctggtgccaaggaatggtagtctcccagtagacagaaaacacccgaagctggccaggtgtggtggctcacgcctataatcccagcacttgggggcccgaggtgggcggatcacctgaggtcaggagttcaagaccagcctggccaacgtggcgaaaccctgtctctaataaaaatacaaaaattaggccgggcacggtggctcatgcctgtaatcgagcactttgggaagccgagcctggcggatcacgaattcaggagatcaagaccatcctggctaacaaggtgaaaccccgtctctactaaaaaaaagaaaaaatacaaaaaaattagccgggcgtggtgg[134 bp omitted]tcaaaaaaaaaaaaaattagccggtgtggtgatgcgcgcctgtaatcccagctatttgggaggctgaggcaggagaatcgcttgaacctgggaggtggaggttgcagcgagctgagatcgcgccattgcactccagcctgggcaacaagagagaaactccatctcaaaaaaagaaaaagaaaagaaaacacccgaagctggtgatcagcagcttcccaataagatcttgggagttcggcgagtgggcacaagcatgtgcactaagaggcaaaatagcagagtttaattggtacatgacctcctggggacattcagtgggtaagggaagaacgcttcaagtgagcacgcgtataacttcagtaaacacactgcgcatgctccccacccaggcgctggtaggccaccgcctaagtgaacagcccaccccaagggaggaactggggagaagggacgcaagaccccagaagtgtgccaacatataaaaccccaactcaaaaggtcaaactgcacacttgtctttcatgtcgcccgcttagccctcttccaagtgtactttcattccttttgtccctgctctaaagcttttcaataaactttctctcctgctctaaatgagagcctattgcccaggctgccttggtctttccttctgcctattcccctcagtcgaattctttcttcttaggagacaagaattgaggttgctgcagacccacacggatttgctgccagtaacagggtttgggcttgggaggtgttaaagaacacaggaggggccaggcacggtggctcatgcctgtaatcccagcactttgggaggcc[133 bp omitted]gaggcaggagaatcgcttgaacccaggaggcagaggttgctgtgagctgagatcgcgccactgcactccagcctggtgacagagtgagactccgtctcaaagaaaaaaaaaaaaaaactcaggaggagggctgagtgcgatggctctttcgcccaggctggagtgcagtggcgccatctcagctcactgcaacctccgcctcctgggttcaagcagtcctcccacctcagcctcccaagtgggattttaggcacccgctgccacatccagctgatttttgtatttttagtagagatggggttttgccattttggccaggctggtctgaccgcaagtgatccttccacctcggcctcccaaacttctgggatgacaggcgtgagccactgtgcccagccaacagctttcacattacaaaagcccaagcagaagctggcaagctgccaacaagctgcactaattcatcaataaatatttactgagtttcttactgcatttgcaaattccaaagcagaagttggacagacacctaaaagcccgccctgtccctcaccagaaggggacaaaaggaagctgagcaggacaggggccacttaagtcccctaaagaaggggattgcataccccagcacctcagacagtatccagtgcacagcacatgttccttatggtttgacttgtgacgagtccccggccaagtttccttgtttcatttttttgagacagagactctctctgtcacccaggctagagagcagtggtgcgatctcagcccactgcaacctccgcctcccaggttcaagtgattctcttgcctcagcttcctgagtagcttggactacaggcacctgccaccactccctgctaatttttgtatttttagtagagatggggtctcaccatg[132 bp omitted]ccaagtaggacctcagtccgtcacccaggctggagtgcagtggcacaatctcggttcactgcaacctccgcctcccaggttcaagtgattctcctgcctcagcctcctgagtagctgagataacaggagcacaccaccatgcctggctaattttttgtatgttcagtagagatggggtttcaccatgttgtccaggctggtctggaactcctgacctcaagtgatccgcccacctcggcctcccaaattgcggggattacaggcatgagccaccgtgcccagccctggtcagtcttgaggtctgtgttgatgttaaacactggtcagctgagcctgaattacaatggcaggagggtataatgaggcatgtccagccacccagtcccatcctgggctgaactagtgtttcaggtttactttagaatgcccttggtctagagggagggtccattcagttacctgggggactgagaattttatttgtggtttacagtaagataattgtaggtgtaactggttaagtccaggttatactggagtagggtgtgtggtgtccctaatccgttatgacgggtgaccacacagacaccaaagaaaggaaagccacatgatgacaaaggcagagattaactctgggcctccagaactaagggagaacgggctgggcgtgatgactcacacctgtaattccagcactttgggaggccgaggcaggtgggtcacctgaggtcagaagtttgaggccagcctgcctaacatggcgaaaccccatctctactaaaaacacaaaaattagccgggcgtgatggtgtatgcctgtaaccgcagctgcttgggaggctgaggtgggagaattgcttaaacaggaggcggaggctgcagtgagccaagatcactccaacctgggagacagagtgagaccctgtctcaaaaaaaaaaaaaaaaaaagaaaaaagaaaaactaaaggagaatgattttcttttgctttgagggacccagttgtgtgttaccttcttagagcaaccggggaaacacatagaacgtctaatgcatattaattgaatggattgtacaaacagagcgaaaagagaaccccatggcttagcaggaaagcagcttagagatgaaaggtttcagtgtccttggcacagggctagtagtcctggagatgatttcatggacactgtcccaggaagtaaaattctggaaatactttcattcattcaacaatatggtcatgggtcacttaacaatagggatgtgttctgagaaatgtattattaggcaatttcatgttgtatgaacatcatagagtatatttacacaaacccagatggggtgtgtgtgtgtatatatatattaaattcattttttttaatatggaaaacgaaatctccgagcaccattattgaatatcagtcatctcctgtacttcatctgcaatgccaatacaaagtgccagagatgaggtttctatatatgctctattataatattttattcgtttatttttgagacacagtctcgctctgtcacccaggttggtgtgcagtggtgcaaacacaactcactgcaacctctgcctcccgggctcaagtgctcctcctgcctcagcctcccgagtagctgggaccacaggcactcactgccacacttggctaatttttgtatattttttttaaagatggggtctcactatgttgcccaggctggtcttgaactcctgggtttaagggatcctcttgcctcagcctcccaaagtgctgagttataggcgtgagccaccgcacccagcctatttatttatttttgagacagagtcttgctctgtcacccaagctggactgcagtggctcgatctcagctcaccgcaacctctgcctcctgggctcaagagattcttgtgcctcagccatctgagtagctgggatttacaggcgtgctccaccatgcctggctaatttttgtatttttagtagagatggggttcaccatgtttcccaggctagtctcaaattcctggcctcaagtgatccaccctcctctgcctcccaaagcgctgggatgacaggcgtaagccaccgggcccagccaaattttaaagaaaacaggatatcaatttatatctcaaggcaaagagaaagaatgtaagttcttttgttgtttttgagattggttctccctctgttgcccagtctgatctcaaacacctgacctcaagagatcctcccacctccagcccccaaagtgttgcgattgtaggcgtgctggcctactttctgttctggttttctttcttttcttttctttttttccttttttttgagacagtttcactctttttgcccaggctggagtgcaatggcacgatctcggctcaccaccacctccgcctcccgggttcaggtgattctcctgcctcagcctcctgagtagctgggattacaatcacccaccaccatgcccggctaattttgcatttttagtagagatggggtggtgggggggcagggggtgtttctccatgttggtcaggctggtctggaactcccgaactcagatgatccgcccgcctcggtctcccaaagtgctgcgattacaggtgtgagccaccgctcccggccctactttctgttttttaactggattactgagtccatttacagataaagccgagaaagcacgtggagtttccaggactggcctaagcctcacctatagaaaaagcaggcacagctggaaggcagagctcttggatcccagaaatcacggatcccattcctaggctgaatccctgatcccctagaccagtggcaaagcccaagagggaaatgcccagggacaggctgttaaaagctcccacactcagcctgggctgcaaggcacactttactgtcagttctgcttggctcagtcagaaatctgagttttttcttatctcaatgcatgaagaaatgaggaggataaaatttgcccactgtggtaataaccattcattccaaccttgtcagttatcttcaaaattgtagctattgacagtaactacttagttatcccatgaccaaaggtcaagtgttttcttaccttagaaagtaaccctcctgggcccggtgtggtggctcacgtctgtaatcccagcactttgggagaccaaggcgggtggatcacctgaggtcgggagttcagaaccagcctgaccaacatggagaaaccccgtctctactaaaaatacaaaattagccgggcgtggtggcacatgcctgtaatcctaactactcggtgggctgaggcaggagaatcgcttgaacccgggaggcggaggttgtagtgagccgagattgtgccattgcactccagcctgggcaacaagagcaagactctctctcaaaaaaaaagagaagaaagtaacccttggaccttcaaaagccaaagagatcagggagtttagtgcaaaagagagcagaggattagaccccaccctcgactcttggggctccgtgaggaagacagaagaccccaaaaaggaagtctgtggtgctttggctgagctcctcaaggaggctcagaatcactaaaagtctcttttttattttatatatattttttattattatactttaagttctagggtacatgtgcacaacgtgcaggtttgttacatatgcatacatgtgccatgttggtgtgctgcacccattaactcgtctcttttaaatctcttcatgtgctattgaaggagacaaaaggaagaaagagtggaggtagatggggaaacaagtcttttttttctttttttgagacaaggtcttgctctgtcgctcaggctggagtgcagtgccaccatcgtgactcactgcagcctctatctcctgggctcaagtgatcttcccacctcagcctccaaagtagctgggaccacaggcatacaccaccatgcccggctattttccacatttttagaaggcttggcgtggtggctcatgcctgtaatcccagcactttgggaggccaggacaggtggatcacctgagatcagcctgaccaacttggtgaaacccccgtctctactaaaaatgcaaaaattagccgggcgtggtggcgcacgcctgtaatcccagctactcgggaggctgaggcaggagaatcgctagaacctgggtggcagaggttgcagtgagccgagattgtgccattgtactccagcctgggcaacaagagggaaactctgtcttggaataaataaataaataaaaataaataaaataataataaataaaattttggcagagatggctcttgctgtgttgtccagggtgctcttgaactcctggcctcaagcgatccttcagcctcagcctcccacagtgctgggattacaggcatgagtcaccacactcggcccatcaatttattttataagcaaactggttcacatacgttttttcccgttaatccagttttggaaagggaaaaaaaccaagacttttaccacctttactggaccgggtcccacaggcagagatccaaggagctggtaagaaatctcacctttttctgccagctatttatcatttgtcccagaaaaccatctgtaggctccgaaacaagagtgatttgatttgcatcctgctcacagtgccagaactgcggggaagttaaaatgtttcccctggaggttaaaacatttgagtctatataaatcaaactaataatagccagatagcaggagaaaggaatacacattttatcatgtgcacacaggactcacagaaaatacgcaaactcagagaaagggccagatagctgaagttgttttttgagacagagtttcactcttgttccccaggctggagtgcaatggtgcgatctcggctcaccacaacccctgcctcccgggttcaagcgattctccctcctcagcctcctgaatagctgagattacaggcatgcgccaccatgcccggctaattttgtatttttagtagagatgggatttctccatg[138 bp omitted]taaagaagaatcaggacttggagactggtgagacaggttatggaagagagagaagaaaggcctggctacggagggctgtcttttaatgcagatgaaaccctgatgggtaggggctctcagaaagaataaactttcttttctttttatttgagatggagtttccctcctgttgcccaagctgaagtacagtggcatgatttcagctcactgcagccacccctcctgagttcaagcgattctcctgcttcaccctcccaagcagctggtattacaggcgcatgccaccaagctcggttacttttttgtatttttagtggaagacagtttc[133 bp omitted]tgccctgtcacccaggctggagtgcagtggtgcgatctcagctcactgcaacctctgcctcctgggctcaagtgattctcattcctcagccttctgaatagatgggattacagatgtgcaccaccatgcccagctaatttttgcattttttgtaggcacagggttttactatgttgcccaggctgctctcgaacttcagccctcacatgattcacctgcctcggcctcccaaagtgctgtgattataggcgtgagccacctcaccccgcccgtccagaaagagtaaatttctttcttttttctttttctttttttttttttttttttgagacaagtctcgctctgtagcccaggctggagtgcaagtggctcgatcttggctcactgcaagctctacctcccgggttcacaccattcttctgcctaagcctcctgagtaggtgggactacaggcgcccaccaccacgcctggctactttttgtagttttagtagagacggggttt[215 bp omitted]gcctcagcctcccgagtagctgggactacaggtgcccgccaccatgcccagctaatttaaaaaaattttttttaaatttttagtagagatgggggtttcaccatgttagccacgacggtctcgatctcttgacctcatgatccgcccacctcagcctcccaaagtgctgggtgggattataggcgtgagccaccgtgcccggcctttttttcgttttgttttttgagatggagtctcaccctgtcacccaggctggagtgcaatggcacgatattggctcagtgcaacctctgcctcccaggttcaagcaattctgcttcagcctcccgagtagctgggattacaggcacagccaccatgcccggctaattttttgtatctagtagagacaggatttcaccagggttggccaggctgttctcaaactcctgacctcatgatcagcccgccaccctctcaaagtgctgggattacaggtgtgagccactgcacctaatctaatcttttataactgtcaatctaatcttataactgtatgttagcctttgtatgcaaaatgctgtcattctgctcacgatctccattttttgttgttgttgttgttggttttttgtttgttttgtttgtttgtttgttttagacagagtcttgctcttttgcccaggctggagtgcagtggtgcgatctcggaacactgaaacctccaccccaccccgcctctgcctcccaggttcaagcaattcttctgcctcagcctcccaggtagctgagattacaggtgctcaccaccacacagccagctaatttttgtatttttttttttttagtagagacagggcttcactatgttgaccaggctggtctcaaactcgtgacctcaaacgatctacctgccttggcctcccaaagtgctgggattacaggcattagccactgcgtttgacctctccatttttacctgtataaatgagttccacttttccccatactggaagcactgatcaccattcttcggtgtccttgtgtccctggacagccaccctcacacacttgtgtttaaaaaaacttttcttatttttttcttgagatggagtctcgttctgtcacccaggctggagtgcagtggcgtgatctcagctcactgcaacctccacctcccaggttcaagcaattctcatgcctcagcttcccgagtagctgggactacaggtgtgcaccaccacacccaggtaatttttgtatttttagtagagactgggttacagcatgttagccaggctggtctcgaactcccggtctcaagcaatctgcctgcctcagcttcccaaagtgctgagattacaggcgtgaacaactgtgcccagatttattttttaatttttcagaggcagggtctttctctgtcactcaggctggagtgcagcgtcaggatcatagctgacgctggacctcctgggctcctcttgcctcagcctctcaagtagctgggactacagacatgtgccaccatgtctggctaattttctttattttttgtagagagacaaggtcttgctatgttgcccaggctggtctttaacttctggcttcaagctatgctcctgcctcagcctcctgagtagctgagattacaggtgcatgcctccatgcctggccaccacggccaatttcaagctaccaatatgagatcattgaacatgcaattggaaagaaatgcacagtattacattgttctatagcaagcctattacacagacataataaatgtaaataggccaggcaagatggttcatacctgtaatcccagcactttgggaggctgaggcaggaggatcgctttgagctcaggagttcgaggccagcctgggtaacatagtgagaccccatctctacaaaaaaacacaaaattaactgagtgtggtgacgggcacctgtagtcccagctactcaggaggccaaggcaggagactcatttgagcccaggaggcggaggttgcagtgagcacatacattgattggcacacagattggcagatactaacatacagtgtgtttttttctccagagaactggctggtaagtgtttaccatagtaagaagacttactatagaacaatgtattactgtgcgtttctttccaattccatgttcaatgatctcttattggtagcttgaaattggccgtggtggccaagcatgggggcgtgcaccagtaagggaaagctgaaatggaaaacagagggtttagggcaacagtcctgaattccggagtgctgtccccctgggggagttatgggaatctgtgggggttgtttttagttgtcacagtggaggtcctaggatgctaccacagcgtttacgcggctggggtcagcgacaataaaagttacgcaatgaaggtttgtcctgcattctcaggactttgttttatttttgagacagagtcttgctctgtcacccaggctggagtgcagtggtaccatctcggctcactgcaacctctgcctcccaggttcaaggaattctcctcccctagcctcctgagtagctgggattacaggcgtgcaccaccatgcccagctaattttgtatttttagtagagatggagtttcactaaaaaaaaatgttggctaggctggtctcaaactcctgacctcaggtgatcctcctgcctcggcctcccaaagtgctgggattgcaggcatgagccactgcgcccaggtcattcccatgactttggaacatctgtgggacattcatggagttggaaagtctaagcctctgagccccaaatctgttttgcgttttttttttttttttttttttgagagggagtcttgctctgtcgcccaggctggagtgcagtggtgtgacctcggctcactgcaagctccgcccccggggttcacgccattctcctgcctcagcctcccaagtagctgggactacaggcacccaccaccacgcccggctaattttttttttatatatatttttagtagagacggggtttcactg[137 bp omitted]cgccccaccctgtttcttttttccttgtcgctgaatcacagggaaacaggtcgtttgtcctgtggacgggctcacattctggactgggctgattgctgcctcatggtgtcgtttcactgggaactttgtcctcctgttttctgcaaactggtggttagagtgggaagcttgatctgatttttttgtttgtttgtttgaagggagctccgtagctggtaggtagcctcctgctgcttagctgaagctggggagtggctgctggtttctctttcctcctgttaggactgctgggagctctggtggtgcctgcctcttctctcagtaaaattcctcatccatcttttttttttttgagacagagttttgctcttgtttcccaggctggagtgcaatggtgtaatctcagtttactgcaacctccgcctcccaagttcaagcgattctcctgcctcagcctcccaagtagctgggattacaggtgcatgccaccacgccccactgatttttgcatttttagtagagacagggtttc[133 bp omitted]gggtttcaccttgttggccaggctggtctctgactcctgacctcagttgatccgcctgcctcggcctcccaaagtgctagaattacaggtgtgagtcaccacaccgggcccatttgtatttaaaaatttttttgaaataggcagggcgaggtggctcacgtctgtaatcccagcactttgggaagctgaggcaggagaatcccttgaacttgtgaggcggcggttgcagtgagctgagatcacgccattgcactccagcctgggcaacaagagcaaaactctctcaaaaagtaatactactaataattaattaataaataaatataagactctgaggggactcagagtcagcgagagcctggcctagcaggactctgtcccccgcctccatgctgccttcctggaggccttcctggctgcctggaggagcggagcagagtgggggcccctttctgttggggcatcacaacagttccccaaggaagaccctcggggacccggatgggggatgcgaccttgtcctgcctctctcccccacccttatggccaggcttggggtgcctggtgcaggtggaggagctaagggtagataacaagatggactttgtggccggcaatggggagggaggaggggctacgggctcacctccctcccgcagcccagccacacctgctctggaaagccctgtagctcctgggcggggtttgccagtcaccgatgctggaagggtttctttggccctgagtgaagagagacccagagggaacactgaggtgcctgcccaaccactctgtcccggtttccttcagcaggaccaggtgagagaaggtgagggggctcctctcccaccctacaacacgcacacctctgcacacacgcccaggcggagagcagggatttgggacgtggacctgtgtgccctcgtgggtccctggtgccctctgggaggcacccccaactcaggacctccaggagaggagggtccctccctcggcagccaggacccccctccccagccagccgccctccttagctccctccccacttccttccaggtggatctgtttctagagctccaaccaccagctccctccccttctccaccccgggccaccaggtccttccttgtctccttcccctcagcagtttctatgaaccaccctggcagtaatggtgcagatggctcgcgcacagctggtggtgacccgactttcctgcctccaccctggggctcctcagaggcttcatggaacccaaactgctggtctcacctccgagccctgccgtcgcccagggagggcggctccgtccctcctgcactccctaatcccgctctgaatcaccgcttctgttctgggtcggagaataaaggtggggtttccaagtgatggccctacgttattgtctgaagctcccttctcctccccagggtggaagtgataatgccgggaatccgggaatcccggggaggtgcaggaagacagcgagctcgaggcagtggggtgcgactgagccggatgtgctgagctgcccggggcacggggcggttggggtagagaaaggctttcagagctgggggacaggacggggccccgggtgagcggagagctgggttatttcacgggaacagctggtgacaaagccggaggggtgtgcggggccggcgagagactgggattgtgtcttaagaggcatagggagccctgaaggggctgcgagctgggaaggggcagggccggcgctgggtgtaggggacagaggggagaggag[133 bp omitted]gagaaaccccgtctctactaaaaatacaaaattagccaggcgtggtggtgcatgcctgtaatcccagctactcgggaggctgaggcaggagaatcgtttgaacccgggaggcggaggttgtggtgagccgagattgtgccattgcactccagcctggggaacaagagcaaaactccgtctcaaaaaaaaaaaaaaaaaaaaaaatctcagtaagatagaccaggtgtggtgtctcatgcctgtaatcccagcactttgggaggctgaggaaggagaacagaggacctcctgaggccaggagtttgagatcagtgtgggccacatagcaagaccccctccccaccatccctacaaaaaaagcaattcaaaaaaaataatgccttcaggcagaatgggagtggtgcttggttcaagcctgacataagtgtgagtttggggcacaaattctgctctgaataccagggacagcccatgtaatacagcatttccctttgtgcccacgcagccctaagggaggtgtggtttgttgttgttgttgtatctttttgagatggatttttgctcttgttgcccaggctggcatgcaatggtacaatctcggctcactgcaacctccgcctcccaggttcaagcgattctccttcctcagcctcccaagtagctgagattacagtcatgagccaccatgcctggctaattttttgtatttagtagaaatggggtttcaccatattagtcaggctggtctcgaactcctgacctcaggtgatccacccgcctcagcctaccaaagtgctgggattacaggcatgagccactgcactggctcttttttttttttttttttttttttgagacggagtctcactgtgttgtgcaggctggagtgcaatggtgtgatctcagctcactgaaacctctggggaggtgttgtttttatccctccccacaaccccctgttgatggacagacaaggacaatgaaacacagagaggtaaaagccctgggttaaagtcacacagcacataaaaggttcctgatcatgccgtgcagggcatctcgccaaacctcaaaaattcacaatctcatagcgcagcttgctctgtgaggcctccccacctcttccttctctccttccaggctccagtcaaggtcagtgcccagcttcctgctctgggccactcagcagccaccttcctccttcctgggtaaggaggtagggagctaccaaggaggcagggacatccgtgtagaacattctgcttttcttttttctttttttttaagatagagcctgactctgtcgcccaggctggagtgcagctgtagtgtaatggcacaatcgcagctcaccacaacctccatctcccaggttcaagtggttctcctgcctcagcctcctgagtagctgtgattacaggcatgtgccaccacgcctggctaatttttgtatttttagtagcgacggggtttctccatgttggtcaggctgctttcaaactcctgacctcaggtgatccgcccccgcttggcctcccaaagtgctggaattacaggcgtgagccactgcgcctggcctaattttctctaaaatagagacaagttctcactatgtggtccaggctgatctcgaactcctgaactcaagcaatcctcccagctcagcctcccaaagtgctagcattacatgtgtgagccatcatgcctggtccctgtctgtttcattctccctgtctctctagtcctgcctctctctgtgtcttctggtctttttctctatttgtctcttcctctgtcccttttatcatctctgtcccttccctccctccctccctcccttccttccttccttccttccataggtgagaaaaagtagcatcttttcctcacctatcacaaagtttgcagctggggcacctacagtaaaaggttaacagacacaagcataacaaatgtatttaaggcaagtgttgacatgggagccttcagaaatgaaggcctaaagaaacag[136 bp omitted]ctcaacctccccagtagctgggattacaggtgcgcgccaccatgcccagctaatttttgtatttttagtagagaaggggtttcactatgttggccagactggtctcgaactgctgacctcaggtgatccacccactttggcttctggaagttctggcattacaggcgtgagccactgtgcccggctacctcccgttctatgatctatggtttaaacgctacatttgaccactatcaatactcccagtatcaaaactgggaaacctgggttcttcacccagagcctaaaacgaacagcattctttgccttgtgggtgacaatagcaaacatttaccgcctgtgtatatgtgccagacactgttttaatcctcagagaggtgatgtcacttgcccaaaatcacacagctcgtgactgtgagtctgaaattggccagagcttgtgcacctagccactggtggtgatgtgtctttgagtcatcgagtccagcattctgtgttggacttagtgaaaggatatact[137 bp omitted]catggtaaaaccccgtccgactaaaaatacaaaaattagccaggtgtggtggtgcacacctgtaatcccagctactcaggaggctgaggcaagagaattgcttgaacccaggaggcggaggttgcagtaagccaagatggcgccactgcactccagcctgggtgacagagcaagactccatctcaaaaaaaaaaaaaaaaaaaaaagaaaaggaaaagaagtgaactggttcaaagaccataatcatacatatcacacaagactgcaagcggaccagggtcagttaatttagcggctccacaaagtcatcagtcacctgagctccatccatcttcacatgctgtgctaccatttattttattttatttttttttttgagacggagtctcgctctgtctcccaggctggagtgcagtggcgcgatctcggctcaccgcaagttgcgcctcccaggttcatgccattctcctgcctcaacctcctgagtagctgggactataggcgcccaccaccacac[187 bp omitted]gctgctacacatccagccatcacatgcagataatttctttcaaaaacagcagaaagaggctcgttcttgtcttggtcccttttgaagaatgaatgaaaccttcctaagccttccagcaactccccccacaactccgatgggtaggaattgtcacataaccatgtggcccgataggaggcaaaagaaatgagacttctgggattagtttagcctcagattctgcagctgagaagttgatcagccacctctgaaggacaagcagcttgcagaaaattagggtggtgttaccaaggagaaaaggggaaatggctttagagtagacaacagggatgccctgaggggttgtgtaggttgttcactgcacgaagtcccctggtcaagaaggtaagcggggtttaaacagacccacagtctactcatcaaaccaggtgtccttggcattgtgtccacccagagagctcactattttcttttcttttcttttctttttttgaaatggagtcttgctgtgtcccccaggctggagtgcagtggcatgatcttggctcactgcagcctccgcctcccgggttcaagcaattctcctgcctcagcctcccgagttcaagcaattctcctgcctcagcctcccgagtagctgggattacgggcgtccgccaccacacctggctaatttttgtatttttagtagagacagggccttg[144 bp omitted]tggccgatgaatgggaagtccacggtggagctgggtgttcctctcaagttcaactggctgcggccaggagggcaggcaggccaggtggacaatttcccttcaaagtggatacaggcaggacatgcaaagatgaatatctctggcactggactctggcaagtaggaaaataaaaacaaaagatgaacatcttgggccgggcgcggtggctcacatctgtaatcccagcactttgcgaggc[133 bp omitted]tgagacaggagtatagcttgaacctgggaggcagaggttgcagtgagcagagatcgtgccattgcactccagcctgggtgacagagattccatttcaaaaaaaaagaacatctctacaaactggatcaccagtaaataatagctacatatacttgtactcaccatatgtggacacccacatatgtacactcagtcgataaacacccacatttaaacataccatgtgggccaggtgcagtggctcacgcctataatctgagcactttgggaggccaaggtgggaagatcacttgggcctaggagtttgagaccagcctgaccaacatactgagaccttatctctacaaaagagaatttgtttttagttagctgggcgtggtgatgtgcacctgtagtcccaactactcgggaggctaaggcaggaggattgcttgagcctaggaggtcaaggctacagtgagccacgttctcaccactgcactccagcccaggtggcagagcaagatcctgtctcaaaaaataaataaaaaattaataaacaaaaaatgcatacaatgtatagatacacaaagtgtatatatatacatatatatgtatacacattcacatatacacacatgctgtgttcacaatcacctagatgacatatgtatgtgtatacatacttacacatatacccttacatgtacacgatatatctctacccatacactaccatgtacacatgtccatttgtacacagctgtatatgtacacacacaattttgcacacacctgtatatgtatacaatgtatggatccccatatccacattacacacaatgtgtacgcatctacctgtgtacacacacccacctatgaacacaatgtagacacatctgtataaacacacttgagatacatgcctgtgcacataggcaagtatgtgccaagtatttacacacctgaagtagaagcacacacacacccacactatgcctgcacaccaccgcatggccacgttcaccagcgccccgggcctccatctcccagctaacgtgtcccgttttcctcccctgacagccatgctggtcgttcagatgcctttctcctttcccatggcccacttcatcctctttgtctttacggtttccactatatttcacgttcagcagcggctagcgaagattcaagccatgtgggagttaccggtgcagataccagtgctagcctcaacatcaaaggcactgggacccagccagctcagggggatgtggacgatcaatgcaataggccgcctggggaaccagatgggcgagtacgccacactgtacgccctggccaagatgaacgggcggcccgccttcatcccggcccagatgcacagcaccctggcccccatcttcagaatcaccctgccggtgctgcacagcgccacggccagcaggatcccctggcagaactaccacctgaacgactggatggaggaggaataccgccacatcccgggggagtacgtccgcttcaccggctacccctgctcctggaccttctaccaccacctccgccaggagatcctccaggagttcaccctgcacgaccacgtgcgggaggaggcccagaagttcctgcggggcctgcaggtgaacgggagccggccgggcacctttgtaggggtccatgttcgccgaggggactatgtccatgtcatgccaaaagtgtggaagggggtggtggccgaccggcgatacctacagcaggccctggactggttccgagctcgctacagctccctcatcttcgtggtcaccagtaatggcatggcctggtgtcgggagaacattgacacctcccacggtgatgtggtgtttgctggcgatggcattgagggctcacctgccaaagattttgctctactcacacagtgtaaccacaccatcatgaccattgggacgttcgggatctgggccgcatacctcacgggcggagacaccatctacctggccaattacaccctccccgactcccctttcctcaaaatctttaagccagaggcagccttcctgccggagtggacagggattgccgcagacctgtcccccttactcaagcactaatgctggcccattctttgagaccttttctccttctctgcctccctcaagatgagtgcccgggcatgagaagcacatggttccatgagcaggacccatctctcttctgtgaagatgcgttgggctgcaagtaacagaaatctcagtgaacagtggcctggcgtggtggctcatgcctgtaatgctcgcactttgtgaggccagggtgggtggatcacttgaggtcaggagttcaagactagcctggccaacatggtgaaaccccatctcgactaaaaatacaaaaattagccaggcgtggtggtgcacacctgtaatcccagctactcgggaggctgaggcaagagaatcacttgaacccaggaggcggaggttgcagtgagccaagatggtgccgctgcactccagtctgggtgacacagcaagactccatctcaaaaaaaaaaaaaaaaaaaagaaaagaaaaagaaatgaatgggttcaaagaccataatcatgcatatcacataagaccagaagtggcccaggtccagggtcagttaatttagcggctccacaaagtcatcagtcacctgagctccatccatcttcacatgctgtgctaccatttcttagctgtatcatcccatggtcccaaaagggctgctacacatccagccatcacatgcagataattcctttcaaaaacagcagaaagaggctcgttcttgtcttggtcccttttgaagaatgaatgaaaccttcctaagccttccagcaatttccccccaactccgatgggtaggaattgtcacatacccatgtgacccgataggaggcaaaagaaatgagacttctgggattagtttagcctcagattctgcagctgagaagttgatcagccacctctgaaggacatgcagcttgcagaaaattagggtggtgttaccaaggtgaaaaggggaaatggctttagagtagacaacagagatgccctgaggggttgtgtaggttgttcactgcaggaagtcccctggttaagaaggcaagtggggtttaaacagacccacagtctactcatcaaaccaggtgtccttggcattgtgtccacccagagagctcactgttttcttttctttttcttttctttttttttttttttttgagatggagtcttgctgcatcccccaggctggagtgcagtggcatgatcttggctcactgcagcctccgcctcccaggttcaagcgattctcctgcctcagcctcccgagtagctaggattacaggtgcgtgccaccacgcccagctaatttttatatgtttagtggaaatggagttt[131 bp omitted]tctggaagtggagcctttttccagtttgcacaaatgtgccatattggcttgtagctggcatgcatccaagtccataggtcctgcctcttcaatcctggctttctagggcctgggatgatcattgctagaactgagagaccagcctggctcagtgaacttcagggcgttccgttcattctttcagtaaatgtttgcagcacatgtgttacatgtcaggcagtgaaaccccccacagcagccttccctctcagaggatacatttgtaaccattacacagtcatcaaaggaataattttttttaatcaccagtgtgcatacagtcatggagttgggtattcccagctaccagggaggctgaggtgggaggattgcttgatgccaggagttagggaatatagtgcaccgtgattggacttgcgaatagccactgcactgcggcctggacgacgtagtgataccctgactcttataaataaataaatgaataaacacaattatgactttgcggatgggagaaaaggttctctgagagcgtattacataagtatcacatgaactccaaaatacatcttaggccaggcatggtggctgtaatcccagcactttgggagggtaaggcgggcggatcacctgaggtcaggagttcgagactagcctgggcaacatagtgaaaccctgtctctactaaacatacaaaacattagccaggggtggtggtgcagacctgtagtcccagctacttggcaggcttaagcaggagaatcgtttgcaccagggaggcagaggttgcagtgagccaggatcacaccattgcactctagcctggacaacagagtgagactccatctcaaaaaaaaaaaaaaaattcttaagagtagatggaatcctattacaagtctggatcaaaaaggcagctttggctgggtgcagtggctcacacctgtaatcccagcactttgggaagctgaggcagatggatcacttgaggttaggagttcaagaccagcctggccaacatagtgaaaccctgtctctactaaaaatacaaaattagctaggcgtggtggtgcatgcctgtaatcccagctgctagggaggctgagacagaagaatcgcttgaacctgggagatggaggttgcagtgagctgagatcacaccattgcactgcagcctgggcaacaagagcgaaacttggtcaaaaaaaagaacaaggcaacttttacaacgattttttagatctcaatattacagtattttctccagactacccacaaatacatactgtgcacctatcatgtatcagaaagcaatctaggagatacgatccctgctctcaagacggcattaacaaatcacttcaaaatataattggtacaggccaggtgcagtggctcacgcctgtaatcccaacactttgggaggccaaggtggcagggtcacttgagagcaagagttcaagaccagcttgggcaacatagggagatcctgtctctacaaaaaataaaaaactaactgggtatagtggaatacaactgtaggaccagctactcggaaggctgaagtgggaggatcaattgagcccaggagtttggggcttcagtgagccacaatcacacctgtgcatagccactgcattccaaagtcgcaacatagcaaga[143 bp omitted]aaccctgcctctactaaaaatacaaaaattagctgctgtggtggcacgcacctgtagtcccagctactcgggaggctgaggcaggagaactgcttgaatccgggaggtggaggttgcagtgagccgagattgtgccactgcactccagcctgccagtagcgcgagactccgtctaaaaaaaaaaaagataattgaaaagatacaattagatcctgaggcaagcaggtgctatggctcacatctgtaatcccagcactttgggaggccaaggtgggtggatcacttcagatcaggagtttgagaccagcctggctgacatggtgaaactctgtctgtgctaaaaatacaaaaattagccaggcgtggtggtgcacacctgtaatcccagctactcgggaggctgagtcagtagaatcacttgaacccaggaggtgaagtttgcaatgaactgacatatcgccactgtactccagcctgggcaaaagagcgaaactcaagagagagagagagagaaaagagagaaagaaaagagaaagaaagaaaagaaagaaacaaagaaggaaggaaggaaagaaagaaagaaagacaaagaaagaaaggaaagaaagaaagaaagaaagaaagaaagaaagaaagaaagaaagaaagaaaagaaagaaagaaaggaagaaagaaagaaaaaagaaagaaagaaggggaggggaggggaaggaggccaggtgtggtgactcacgcctgtaatcccagcactgtgggaggccaagaccagtggattacctaaggttgggagttcaagaccagcctgaccaacgtggagaaaccctgtctctactaaaaatacaaaattagccaagtgtagtggcgcatgcctgtaatcccagctactcaggaggctgaggcaggagaatcgcttgaacccaggaggcagaggttgcggtgagccgagatcatgccattgcactccagcctgggcaacaagagtgaactccatcaaaaaaaaaaaaaaaaaaaaaagaagaagaaggaaagaaggaaaaagagaggaaggaggaggagaaatattttttccagtctacacaatgaacatgactatatccttttggggagggagtacgtttataatataaattagtaatttttggtattttgatgttggtggtctttttcaggcctcatgatgtaaatatccaccttctgttgagatcagaggaaagaaggaaggtgctgcttggggttccccatctgatcccccttggtccagccctggttttcctgaggcaggagggagggatgaagtctttggagaagagttgggtgttgggcgctcggcagtgccggcagtgcaggaggcaagcctttcagttaggctgaaggttcagacaggcaccccaccaagccggcttcctggccctgactccttggggcagtgcagggaccacgtgcaccctcagctcaacagagcccactctggatgcaggcgagatgcggaaggtgcaatggaggcaggtggggggcctggcagaagctgaaagacgagtgcccgagacacagagagatgagcgcagagactgacagggatgacggatgcagcagggataaagggcaggagggagttggagacagagatagggaggagagaacagccagagggcaaatcagacagagaacagagaagagatatgaagacagaaccaggacagagtgacctgagtcaggcagagatggggacacattgatatggagagtgatacagtcagaaaagtctctgggccaggtgtggtggctcacgcctgtaatccctgcactttgggaggctgaggtgggaggagcacttggggtcaggagttcaagaccagcctgagcaacatagtgaaaccctgtctctataaaaaaatgcagaaatggctgggcatggtggtgcacacctgtaatcccagtactttgggaggctgagactggagtgcagcggcgtgatgtcggctgaccacaacctccgcctcccggattcaagtgattctcctgcctcagcctcccgagtagctgggattacaggcatgcaccaccacacccggctaattttgtatttttagtagaggcggggt[136 bp omitted]acagtgctggtggcgcacccaggtgccttcagattcctcttgccagttctgtgcacccagcccccagcttgtgtgcttggtgtattaatcatgcctttgtattttctgaacttctgctgctttgacaagtgcgggcctcgatgactctggagggactgaccctcccagggatagccaaatgctagagatagttaactactcacctttcctatgtaaaccagccaatccagagcccacaccccatccacacctttatgagcacaggctccctgagccaggcaccaaaaactcaggacagcctctatgctccagagcctgctgaaattcaaactaggtaatctcaaacccacttaccttgcctcttctggtcttttttgttttgttttgtttatttttattattatttctttgagacagagtctcactctttcgcccaggctggagtgcagtggcgtgatctcggctcactgcaagctccacctcctgggttcaggccattctcctgcctcagcctccccagtagctgggactacaggcgcccaccactgcgcctggctaattttttgtatttttagtagaaacggggtttcaccgtggtcttgatctccggacctcgtgatccacctgcctcggactcccaaagtgctgggactacttttgtttttttaagatggagtctcactgtgttgcccaggctggagtgcaggcatgatctcatctcactgcaagtgattctcctgcctcagcctcccgagtagctggaactacaggtgtgcaccaccacacctggctaattattttttttttttgtatttttagtaga[131 bp omitted]ttttttgaaacacaggatcttgatctgttgcccaggctggagtgcactggtgcaatcatagctcactgcaacctcaaacttcaaagctcaagtgatcctcctgcctcagcctccagagtagctgggactacaggtatgaaccacggtgtttggccctgaaacctattttttttttttttttttgagatggagtctcactctgtcacccaggctggagtgcagtggcgcgatcttggctcactgcaacctccacctcccagattcaagcaattctcctgcctcagcctcctgagtagctgggattaaaggcgcatgcccagctaatttttgtatttttactgg[133 bp omitted]ttttgctgctaacaacttaccctatgacgttcttcccaggactgcccttgggctggaggttcctgggagtttatgtcattcctccctccctctgtgacccatggctcatggctgactaggggtggtatagtggcaagtctccagatgtagcccctagtgagcatgtccctgatattcacagatttgtatagtgccctcccgtatttaacgtgggcttgcctgacttgcattaattataaaatacagtggaagagaaattgtgccagtttcaagcctagtctttaagagactggtagcttctgctcctggctcttggaatactcactcttgggagccctgagctatcatgcaagaaatctagttatcccgggggagaggccacagaggaatagtgctgacactgcatggagtgtcacactgcacaacccagctgggcccagccttcatgctatccccaccacggtgccacacacatctgatgtgccatcttgtatgtgctagcccaggtgggccctgagatgactgcagctctagccaacatcacatggaactgaagaactgccctgctgagcccagtcaacccatgcatttgtgagcagtcatagatagttattgttttacaactctaagttttggggtggtgtgggtttttgttgtttgtttgtttgtttgtttgtttgttttgagatggagtagcactctgttgcccaggctggagtgaagtggcatgatctcagctcactgcagcctccacctcctggtttcaagtgattctcctgcctcggtctctcacgtagctgggattacaggctcccaccaccatacctggctagttttttttttttttttttttttttgagacggagtctcgctctgttgcccaggctggagtgtggtggcacaatctcagatcactgcaagctccgcctcccgggttcacgccattctcctgcctcagcctcccgagtagctgggactacaggcacatgccaccatgcccagct[138 bp omitted]cccggcccagtttttatgtatttttagtagagatgggtttcaccatgttggccaggctggtcttgaattcttggcctcaagtgatctgcctgcctcagcttcccaaagtgctgggattacaggcgtttgccactgagcctggtttgttgtttggctataataagctcaaacagggagatacaaaggcccagttccatgtgtcccaagacaggaaagactccacaacttaatttgtgctctggagctccctgcaggattaggctgaggttggaacttcacctgaagtcacctcttgctcctcttcccctttgctgtcctgttttccccactcttctgctggtttctcctgggaacatttctttctttttctctctctctttttttttttttaagatggagtttagctcctgttgcccaggctggagtgcaatggagcgatcttagctcaccacaacctccgcctcccgggttcaagcgattctcctgcctcaacctcccaagtagctgggattccaggcatgtgccaccatgcccagctaatttttttttgtgtgtgtgtgtttggtagagacagggtttcaccatgttggccaggctggtctcgaactcctgacctcaggtgatccacttgcctcagcctcccaaagtgctgggatcgcaggcgtgagccaccgcacccagccagaacacttctttaataaatgactggcatttatatcttgtctcaggctctgcttccaagagaagctgatcttagacctgatgcttctaattttttcatctccaaccagaacccagggaggtcagggtccggctcccccattctccctctccactctttcttgctcctctcctgcatccaaaaggcataaccaccttccaggctccccaaacaacagggagccatctaccggggtcgggggcatgtaagaacatccatgaggtctctgaaggaagcagcaagcagcttgtttgccgtggccagcagcaaaagaagccccccaaccataccacgccggagggggatcataaggaggccaggtaggcaaagttaaggcagttgcatgtcagcagcacttcaggaggcaggtggggttggaggttgtctccgatcctgtgtctgcggtaggaggggctctgctggtagttccctctcctcccacaaggagcttctctccacccccatcagttctctgtctctgtaaatcctagaatccatcaccatggatcctccagcaggtcccacagccggctgctgctggagtcagataagtcagcggagaagatgctggggggtgggggaccagaacccagaggaggacccccgctcagggcctccagccagtccagggagtccgtggggtccctgggagaaggggaggaggagttcgtgggagacgggagtgaagaggagaaaacagatgagaggccttcagagtccggggagggggacagcacgtcgaaggagccagggaagtccaggggaatagggggcagggggtctgcgggataaagaatggtacatgagcttggaaagtcaggggtccgggcgccagccccccataccccatttccaggatccagctccccagctcacgcctcccttggacgcaggagtccagaacctcagcccccacctcccctaaatctagcagtttggatcctaccatcaggctccacctgatcctccaggatgtcatcgatgccccggttaggaagcaactgcggatggagaaatttggcgtgaactcgggactgcgacctggacctgactggagaaccctagccggattcaacccacaccctcttacctgcgccctccggatcgcttcctgcagctcctcctccagagtcagagccgctgagcccggccctgaggaaggggtcagggctggagctgcagcaggagccggagtgggagttggagccggagccgtccccggggtatccgcggcacgtggaagaggtggcctgtgagatgctgcgctgggcttgacctagagcagccaagagggcgagcgcccataagccatgcccacagggcgcaaccccacccactcgcaacgtgtggctccaccccttgatcctctcgcgacccctcgctcatcaacccctttggcctcgccccctattctttcattggctcctcttctctaaagatccgccccctgttagtctgaaccacgtcccctcgccttcaaggcttcctaccgctggtcctcgcccccacacttcattggctagttttttcgacaccccgccccggcccactttgctttctcttcattggtccgcaagctcatagccccgccctcaccgagccctgacgccgggcggctgccagggccttgggcttgaggcgcggccagggagcacccgcgggactgtcctcgcgccgcggcttcggccgctcgcggggcggcgcgccgccgcgcatgcgctccaggagcatagacttggtccccgacactgggaggccccgcaggcgcagctgctgccggagctctgagacctggggaggggcggggcgtgggaagaggcagtgctgggcgggctcccgggcgcaggcaggagctggacaggatatttggaaaccgagaaaggaggcactgggggtccggactcctgggaccctaaaacaggatgggactgggtacccgatctcctggatttccagagggcagaggctgcggggttggaattctgggaccccaccgaaggagagagaaggcctggaaagttacaccccaaactcaccgtcagctcctccagtttaagggtctgaagttccaacttgtgtggggggggcgaggggctagggactcctggtgggcagggagtgaggggagagggcttcatcctggtgataatcgtgaggggcgaacaaaggttagagaggtagagggggaaaaggcgttctggggtcctcaaagacggggagctggggaagatgcagaaaagtgagggtccagaattctgggtctccaagggcgcaaacatggggctagatttctgtgcatgggggaggaggaactaggcgttcagactcgggtctgaagggcgaagggaggggctgggatcctggactcttaaaccctgggagaagagagggttgggggccccaatcccctaatcttggactcgaggtttgagggaggaggatgctgggacctgaatttctgggtcccgggagaacagaagtgggtgtcatacctaggatgtggctgctgcgagtctgtcccttcccacagagatggcccaggaggacccagggcggacccctcggcttgggggtccgccctggatccctgtctcggctctgggggcatgtactggtggtatgtcaagttccccctgggcttggactccctccaacgttgggagatcttgggagactcctgaaagagcaggtgtgatgttttaggcttcagcgcggctcccaccttccggccccaggactacatgcaaagtatggggtcagctcggtgccaccgaagaggagcaaaaatggcagcagcaacaagggagacaaagactaggctctcagagggacctctccctccagtcgagactcaccttctttggggacctccaaggaggacaatattctggctcggggagcaggaccccagggctgaagaggaaaggggccgtgcccgagggcaaggccggggccagaggagggtctgaggctgagatccacgggtccggatccgagactggagagacggtgaaggaccctgagaggcctgcaggcagcaagccaggccgggaggagcaaggctgtgtggaaagcggggctccagggtgccggagggcaggccagggagcaagacttgattgctgggagatgggcgcctgaactggatctgagggcggaggtgtgggggggctccggttgctacattctcaagtaaagcaggaattttctatcacaaaggggtgtggtagctgaggatcacagatgtctgaggttttgctaggacaggggtggggcctgcactcctggttcttggggagagggagaggctgaaagctacatccaggccggccgcggtggctcacgcctgtaatcccagcagtttgggagactgaggcgggcggatcacttgaggtcaggagttcaagaccagcccggccaacatggtgaaactccgtctctactaacaatacaaaaattagccaggcgtggtggcacgtgcctgtaatctcagctactcaggaggctgaggcaggagaatcgcttgaacctgggaggtagaggtttcagtgagcttagattgagccatgacactccagcctggcgacagagcaagattccatctcaaaaaaaaaaaaaaaaaaaaaagctatatccagagcttctcatgtataccaaatgtggagaccaggatgcctgtcttctccaaagaagcaggatccaagttcaagcatctcattagggtggagaagcaggaagcagagctcctaggggtggggtggccagagacctggaccctggatccttgggaaaggacaggatgggattttggtctgtcccaggggatggagactgagctgcaggaaccaatgaggggtatctggcagctgtattccaggatatcccagtggggagtggggggtcaccatcccctcccttttggggcccatacttactctgctcctgattccgtctgtggatccgaagctggaggactgtggagggaggagggaggtgggaggaggaaggcgggaagggagtgtccaggagcctggcctggcaggctggtgggagctgcagttgttggcgggatatgcgtgcccagcccccttacacagcctgtgcaggcgggtgggcgggcagcaggctcccttcctcgggcctcccgcctgctccctgccagcgcagcgccgcgggccagcgccattctggggctacgagccagccagcgtgcaggctggaggcagccctgcccccggctccacctgccccctccatgagcaagcgtgtgcccaccccaccccctgcgcaatcgctatcttggcagcctggcccctttgcacctcgcctccctttatccatgcactcctgctactttctgtgctatctcggggccttcccacagtcaacactctccgcatatccacattttcagtatgcatctctctgggctctagttttgcacacatgccatttttacgcacttgcatgtttttgcagactcttcatccttgactcactctgcctcagcatccatgttaacactgtttttttttcctttttttaatttgttttatttttttagagacaaggtctcactctgtaacccaggctggagtgcaggggtgtgatcatagctcactgcagccttgaactcctgggctcaatccatcctcccacctaagtctcctgagtacctgggactacctaaatttttttgttttgttttttaattttttgtagagacagggtcttgctgtgttgcccaggatgaatgttaactatcttttttttttttttttttgagacaaagtctcgctctgtcacccaggcttgaggacaatgtcacaatctcagctcactgcaacctctgcctcccaggttcaagcgattctcctgccttaacctcccaagtagctgggattacaggtgctcaccaccacacccggctaattattattattattattttttgagacagagtatcgctctgtcacccaggctggagtgcagtggtgcgatctcagctcactgcaacctccacctcccgggtgcaagcaattctcctgcctcagcctccccagtagctgggactagaggtgcacgccgccacacccggctaattttctgtattttagtagagatggggtttcaccgtgttgcccaggctggtctcgaactcctgagctcaggcaatccgcccgccttggcctcccaaagtgctaggactacaggcatcagccaccttgcccggcgtcatttttttgtatttttagtagagacatggtttcgccatgttggccaggctggtcttgaactcctgacctcaggtgatccacctgccttggcctcccaaagtgctgggattacaggtaagagccaccgcgccccacctggatgaatgttcactttcttatgtgcacagtcagggtttgtcccccaatttgggagcaaggatctctctgcacatttctgcttttctctggacatatgcgcctttttgtatactccttgctctttgattgctggtgtctttgtacccatccaaccacataggcacgctcacgtgcacactcaagtaccctttgccttctcaggaactgatctgtagttcgaaacacttgcacacttcttttttttttttttttttttttttgagatggagtttcgctcttgttgcccaggctggagtgcaatggcgtgatctcggctcaccgcaacctcctcctcccgggttcaagcgattctcccgcctcaacctcccaagtagctgggattacaggcatgcgccaccacacccggctatacttgcagactttttgcctgccctgggacctaaaacaagacctttgacactttcacagcttgacagctcattgtcccctcacccaaactcccacactggtcctctgaggtccctcctctgctcttctgcccctgcgtgtgcgccagtataagcctttgtttctcttcagtgcttgagccctctgcacgcctacccctggcctccaatccccattgctccccccgtgagcatgctactagccatttgcacactcgttgatccaccacagccggacccctgtgcttgggcctcctttatgcaacatgaccttttgcacaaaaaacacaggcctcatgggacctaccacccctcccttcccaccccagagtacagcattctcaggatcccatcccccacgcataaagagagccctctctcaccagatcggaacttggagcgaatgatttgggaacgctgggaggaagccgccagggtcattgccaaggccgggatggggacctggacggagagggggcagggcaggggccccatagagggctggctcagagtggaggtcaggaggccgcccctgagagtgaattcagcagggaaagggcccgaaggaggtgggaataggagcagccttgggccataacttccggatcccaggggctgtagaggagggggctgcacacccggacaccttgctccgaggaaggaggaagctggggacccagacacctggtctgaaagacagggctgagggtctcaaccctgggatcctgggaggggagggacctggaatctgggactcctgggtcctgaggaggaagggttgcgggttgggacccctgtgtctaggaaagggaggaagcagaggggcctggagtctggaatcttgaaggagaaggaggttaagggctggaactcaatactcttaggagatgagaatccaagatcctgggtggagaggggaacggggccctgacaggtttctgaggaatagaagggcccctgtgacctgcatctgagaaggagtgagtagggtgtcagccaccaggttctctggggaagggactgggaccagagaggggatagaaccgttgaggagtgcgccccccccgtccaccccaggggcttctcaccaggtgggctcggcgaagctgtgctctggggcgggttgagtctagaggccgaggctggacaccacaggctccgccccaccagcctgggaccgcctccaacccaccttcctggggtgtgacgggagccccgccggggaccctgagaaggggtgggagcacccgctgggagggcctgtgcgggccttgggggatgctggggggtgagagcggggacgtcagggttccccggctcgctcctcctgcacgtcctggggttgtggggtcggggggaacggtggcaggcggactgacagaagcaggtgcccggagaggggcgccgggtgagcagcagcggcaggtggtcgtgtcctggccctaccggcaggtgccacctgtcgcctactttttccctgacgcagcaactggagtcaagttcaggggagtgaaaagttcaaacggggggcccagattcctggatccaagaaaggagagggatggggacctggagtcctgggtttaaagaaaaagaggcaggggcctctggggtgttgggaacagggacagaggtgttcggattcggcggtgtgcccggcaggcagaaaggtccagagggggctggggacttagattcctgggtctgagggaggagggggctggagtatggatttgggggggtgtcgaagggagaatcgctggttcccactggcaggactgagggccttataatcggcagagcaagcttagggccgtgttctgaggggtgtgggaggctcctctgctcttgggttggattacatgcaaaagggcgagccaaggccgtggctataaatacctcctcagactcggcaggggcccagacaagggccctgcaaccttgttctgcagaaaatcatcattagcgcccctgagtcttaacaatcgaggcgctgccgataccacggatacctttattgctccctggcattcacatcctaagcccatgctcccaccgtcccatccgctacttcccgaaaactcaatctcccaacattccacgcgggataagaactacaactcccagaaagctttgcgctcaggcgggctcctgtccgtagaagcccgtgacatttcaaggttcgcgcgctcgtttggtattggttctcaaggagacgtggccacgggaggcccatggcgataattggctggcagctcctgctgctcaagatcccagaggaggcggcggagcctacggagttcacggtgcaaggcatcgtccgtcactggaccagtgaggcgcaggcgcgagctccccagggggaggatgaggggcgggtgcgaggagaagctttcgaagatgtcccctgtgaggccgaaggcggcgcggttagagtctgaaagtgggagtgaggtagttgcatcgggaagagccgaggctgcgtcacacccaaaggaagaaaaaaactacaaaccccagcaactcctggggcggggtccgttcacacgctactctaggagcccctgggcatgatggaagttgtagttcagacgatggaaggccaccgttgcctgggaaacggcttcccaaatccccgagaaagggctgggaacttgccttacagattcctaaaggtggaggagtcaagttcaggggagtgaaagtcccgagacctggactcctaggggtggtgggtgggtggctggtggagggaatggactagggatgcgaaccccagagaataaagggagctgggggcttgaactcctgtatcttgacgggggaaggggctgggtcctgcacttatgtcctggtggggagggacaggggtccagaatctggggttagaaggaga[140 bp omitted]ccccgtctctactaaagatacaaaaaattagccaggcgtggtggcgcatgcctgtaatcccagctactcgggaggctgaggcaggagaatcgcttgaacccgggaggcagaggttgcagtgagccaagatcgcgccattgcactccagcctgagtgacagggcgagactccgtctcaaaagaagaagaaagctgacagccccaatgctgtatcccattgctcctcacctgtgtccacagcctcccgctctgcagggggagggtcccacgcggctggcggcccgcggccagggcccagctgatagtggctgagcagatggtgcagctgggcgggggtcaaggtggggtggtcggttcttaggctgctccatgaagcctggtgggaagaccaggtgagaggttgatggtcattacggggcagttaagaaatgaaatggaagggcttccataaggggagtgggtgtggtgggaagataatggcatctctgcagtgtcttctgggcactgtgaagtctgtttatcaccaaagtgatggtggggaagggtgtgctcccagcaatttgtaaaaatgtgatgtgcctcaggataattgaggatacaggaaatgagtagggtggaaataaataagattggccattcgtttatattattgaatctggcgatggtacttggggattttttttttttttttttttttttgtccttaaagagacagggtctcactccgtcgcccaggctggagtgcagtggctcgatcgtggcttgctgcagcctcaaactcccggctcaagtgatcctgggctcaagtgatccttggccccagcctccagagtagctgggactacaggcacacgccaccacacctggttaagtttttgtagagatgggatctcactatgctgcccaggctggtctcaagcttctcaaagttctaggattacaggcatgagccactgcgcccagttgggattcattattctatggcggccactctatatctgtttgacaatgtctacacctgatgtagctgacgtcagaaccatcaatgtgcttaacatcagagactccacctagactgcctgagttcaaaaatcccaggtgggtcacttattaccttccggcaggtcaccgtcccctagtctcctcatccataaatttggagaacaggaactatctaatagagttggtatgaggatgcaatatggcaaaattgtaaagtacttggaacactgcctggggcttattaaatgcatggtaaactttctttcttattgttttgagacagggtcttgctttgtcacccatgctggagtacagtggcatgactgtggctcactgcagcctcaacctcctgggctcaagcagtccttccacctctgcttctggagtggctgggaccacagacgtgtgcctccacacctggctaatttttaaaatttttggtagagatggtgtctcccctatgttgccaactggtgtcaaactcctgggctcaagcggtccttccacctcggcctcccaaaatgctggcattacaggcattagccactacgcccagcccattataaacatttgatataaataaataaatgtctatggggaacagtttttg[143 bp omitted]gaaaccctgtctctaccaaaattacaaaaattagccgggtgtggtggcgcgtgcctgttatcccggctactcaggaggctgtggcaggagaatcgcttgaactcgggaggcggaggttggagtgagccgagatcatgccattgcactccagcctgggtgacagagtgagactccgtctcaaaaaaaaaaaaaaaaaaaggaaaaataagtgaaatcaagcgacctgtcctacctgattctgtttcctcatccaaaaaacagtcagtcacctacttcgatggggctttgtcagcattaaactagaagtgctaaacagggtgcctggcaggtagttcatgttcaatgaatgttttaatcatcatgttcctttgtctcataccacactttctgactcagcatgtctgagtgagggaccctggaaactttttttttttttttttttctggagacagggtctcgctctgtcgccccggctggagtgcaatggtgcaatcttggctcactgcagcttctgcctcccaggttccagcgattctcctccctcagcctccagagtaactgggattacaggcgtgcgccatcaagcctggctaatttttgtatttttagtagagacagcgtttcgccatgttggccaggctggtctcaaactcctggcctcaagtgatccacctacttaggcctcccaaagtgttgggattataggcgcgagccactgctcctggcctggaaactatttttaataagttccaccaggattcagacacagccgagtttagtcattgttggtgctggcttccttctacctgccaatgtgttacccacagtgtctgagctggggctggggatggcatggggttcaaggggagctctgacggtgagctgaatatagaaggtggctgaggggggttgaggagtcagaggtcaggggtcaggtatagctgaccaggagtcaccttgagcagggaagtgcggggcacacagagcaggttcacagccatggagagtttccggaagaactcagtggcaatgtcgcccagcccagctccctgtagccagtccaagacgaggtccaggttggttcggatttgaacagctcgggaccattgatagaaaggccggccttgacctgtgggtgttaaaggtatgagaggcagttggttggctggactctgtgctcctgcctcccagactcttcctatccttcagcctgggatctggagcttgttctccagggtacccaaaggtgaggcttgagcccgtggtgtgtctaatatgacctgagtctcagtggctcctgtctttgcctccctgacagctcccagccaaccttcacctcgttccatcagcgagttgagaagggatgcgttggagaagaagaacaagtagccaaaagtctgagacacgaggtcagggtgcagctcgcactggctggtcagctccaaggctgcctggaacacgcccagggtaggtctcaatcctggaggcatggcccccagctccgcgccaggccccggcagctctgcaccagctgtgaaagggttactatccaggagagcaggcagcgttgaatagagagtctgagaaaatagagaagtggaaacaagtgattggactacaactcccaggaagcttcagggtaatagagcatgaagatagtggggagctccaccaaagtcttctgggagttgtagtccattctacagtcaacacccaaagggtctccgtgagcaaatccctacttgatagaagggtatacaagtttctcgagtattttaagatcacctcttgtgcattgtgggacttgtagttctcagcagagacagctcaaggaggacaaaggatactggacaaagagttccctttcagtcaaagaattattcatcctgaattcccaaaggaaagaaaaagaatggagagtcaggaagtgggagtgggatggcagtttgccagtggaaaatgagatcaggccaaggacaggaaatgaggtcagaaacagaagaaataaacgcacacttggcaggaatgtacaggaagtgaaggaggaaagggcttcacaatccaggctgctagaggaacttagagactgatagttagctgtcccaaaagatcctctctcattcttgcacatagggcatcaagcccaccataagccagaaaccctgagaatgccaagaagtggtgttaaggtcaagggtaatgggggggaaactggggcagaaagcaggcccttccaggaagggcactcagagaaaaagatctgtcgttctgaaagggaagtgaattcagagctgtaggaagtgaggtcagcaagcgaaggaagtggggcctgatgaaagaggatcttcagtttaaatcacagttcctggcactatttgatctctagctatctatcaatcatttatctatctattatatatgaaacttaacagtgactgaagagtagacttagaaagtgggagattcagaaggtggtaatggtgatgttaccaagtagtgaggtcagcctgtcaaaagtggtgatgattacttttttttttatttcgtttaattttattttacttttttgagatggagtctgtctctgtcgccctggagtgcaatggtgcgatttcagctcactgcaacctccgcctcccgggttcaagcgattctcctccctcagcctcctgagtagctgggattgcaggcacgcgctaccatacccagctaatttttgtatttttagtagagacggggttttacc[137 bp omitted]cgggttggaatgcagtggcatgaagtaatcttggttcactgcaacatccgcctcccaggttcaagtgattcttgtgcctcagcctctccaatagctgggattataggcgcaggccaccatgcctggctaattttgtatttttagtagagatggggtttcaccatgttggccaggctgctctcaaactcctgacctcaagtgatccacccgccttgacctcccaaagtgccgggattacagatgtgagccaccgcgtttgcccaggtgatgattacaaaggaaaagaagccagaaaggcaggaagtgatgtaagctctaacaagtggtgtcagaacagcaaagtccttgggtgagatgggatgtcatgtcagagaaaagcagaaaatcttgagtcaaatagtgacatcagagccacacagtgtagttcaaacaagaagtgatgttaccacaaacaggaagtgatattacgtgaaacaggaagtgatgctatgtcaaacaggaagtaagaggcaagggccaaccttggtgaggtagtagacagactgctggaaggtacacatgatgacctcatccaggagggccatggcctcatcacataattccaagtcattgcagagctgtgggtctgaggacaggcttggggttaagagggagaaccagaagtcggcagccaggagcccaggtccccaggtgcagggcatgatgggagacttggacaagcctgagcctgagtcagagctcaccctcttggtcagcctccttctccatttccagcaccttctcctgcacaaagctaagcagctccgtggtgttggccatccacagcatgagtggccgcagctccacagacacagcttcaggagtcaggggcacctcggggaccccctcagggtggcttgaaaaagaggaaggaatttgtgatccctgcccaaccctcatcatagtttacaaaccccaagatctaagtctaagtgggagagcaagaccaactcccattgcgcagctggaaaagttgagcgcaaggagaagcagaaacttgcactggggcatgcatggggtgaacacagaactagacgcaaaacccaacccctgcatccctccagaccactctgctcagaatttctcttacttttctggctgacggtctccaatttccttaatcttttcctgtggaacagtaagatcagaatcaaggtgagggggatccactgaggggcttaagagttaataccctggtttttatagaagcacaactctcatagagactggtcctacttttcttagagatggggtcttactatgttgccaccggtggtctccaactcctgagctcaaatgatcctcccaccttggcctcccaaagaactaggattacaggcatgagccactgcaaccggccttcactcttcatacggattctttttttttttttttttttttgagatggagttaccctgttgttgcccaggctggggtgcaatggctcaattttggctcactgcaacctctgcctcccaggttcaagtgattctcctgcctcagcctcccaagtagctgggattacaggcatgtgctaccatgcccggctaattttttgcatttttagtagagacggggtttcaccatgttagccaggatggtctcgatctcccgacttcaggtgatctgcccgcctcggcctcccaaagtgccgggattacaggcatgagccaccacgcctggctcttgagacaaattctaatcccacaagctttagaatggtctctccttactttttaaaacatacacaccctatgattatgagtgatctagctccttcaggtcctcttctccaatttttacccccaagaaactccttaaacctctctggttaggccctagctcaataggatggaacgtttcccccactctgaatggtttctttctggaacttccatctgtaggtccagtggatttgtgcttcctcgcctccaagaatgaactcgctcactgctatccaagctccaagcccaatgggctgcggtgaattctcacactgatctctgtcaacttctcatccagtgggatctctcccccaccatctcccataatggtttcttcctaaggtgagttcgtgcttaggtgagctctcctaaggtgagtttgggcttccctctaagtgcagtggatctacatctcccagcattctatg[135 bp omitted]cccgtcttactaaaaatacaaaaaattagccgggcgtgctggcaggcgcctgcaatcccagctactcgggaggctgaggcagaagaatcatttgaaccccggaggtagaggttgcagtgaaccaagaccgccactgcactccagcctgggtaacagagcgagactccgtctcaaaaacaaaagcaaacaaacaaacaaacaaaacccaaaaccccaaatccttcccgaggcgtcatgggaacagtagtatccagcccagctatgaaaagggttgaaggtagggaagggaggctggagaagggacttggggcgctggtggggctggacggcgattggggggcgctcacccagacggcctccttgatgagccgggccaggcggcccagcagtcgtggcaggtggcccagctccagctcacgggcggaatgctgcacgcacagcgccagcagcgtggcgggcccgaggggcggcaggtctcccgagccggcggctgcggcgcgcacgatctcgcccagcagcgcctcctcctcgcgcggccggaagcgcaggactggctcacggccgtccaggtaggcggccagtgcctcgccgcgctcctgcaggccgcggccgcacaggcgacaggagaaggcccagccagggcctggcggcgtggccccggggcgcgcgggcagccacggcggcctcgcaggccccgagcccccagtgcgggggtccttgtacatgaacaggaagtgctcgcccagccccaggaggtcgcccgggtgcagctcagcctcccgcagcaggaggcacccgttgtgcgtgactggggcgccccgggacgggcgcaccatggccgggtgctcagggcccgcgcgcactgtgcagtgacgcggcaggatgtccggggcgttgaggaaggtgtccacatagggagccggggaccccccgcggccagacgagttcccacctcgcccaaacacgtgctgctctcgcgtcatcacatacaccacaaagtcctggaggggaaacgaggatgcactaaggacatcacttcaatccatatcttcagatctgttctctctgttttctacaacaacttttctattcccaccaactttttttttccttcttcttctttttttttttttttttttttttgagatggagtctcgctctgtcctccaggctggagtccagtggcacgatctcggctcactgcaacctctgcctcctgagttcaagcaattctcctgcctcagtctgttgagtagctgggagtacaggcgcctgccaccacacccggctaatttttgtatttttagtagggaaagggtttcaccatgttggccaggctggtcttaaactcctgatctcaggtgatccacctacctcggcctcccgaagtgctgggattacaggcgtgaactatcgcgcccggccccccaccgactttgaatagacactccaaggagatctggatctcaaaggactctctaagcacccgcaacgccactgagtggactcttcccaggcactttgtatggtggatggtcccataacacccatcccgaagaccggctatgtacaaggagacccccctttttttctttgagacagagtcacgctctgttgccaggctggagtgcagtggcacgatctcggctcactccaacctccgcctcccgggttcaagcgattcccctgcctcaacctcccgagtagttgagactacaggcgcgcaccatcacgcccagctaatttttgtatttttagtagggacagggtcaccatgttggccaggatggtctcgatctcttgaccttgtgatccgcctgccttggcctcctaaagtgctgggattacaggtgtgagccaccacacccagccagagacccatttcttaacatgggctctaccatttctttccctcaagcattagatgctttcaaggagatccctatttctaaaatgaactgtgcaactaccctcaccctcaaagaatggacctttccaaggaaatctccttttccccatccctggtcccacctgtccattatttcacccccaccccaccatggtaaaggcttccagatatatttccccttccaataatagtttttctcaatattcctcaagcaatgaatgggtacttttaaagagattcccttggactgggcatagtggctgacacctgcaatcccagcactttgggaggccgaggcaggtgaatcacctgaggtcaagagttcaagaccagacacggtgaaacctgtctctactaaaaatacaaaaattagccaggcatggtggcgcatgactgtagtcccagctacttgggaggctgaggcacaagaatcgcttgaacccaggaggcagaggttgcaatgagccaagatcaggctactgcactccagcctgggcaacagagtgagactcaaaaaaaagaggccgggcgcagtggagaccaaggccggcagatcacctgaggtagggagttcgagaccagcctgaccaacgtggagaaaccctctctctactaaaaatacaaaattagccaggtgaggtggctcatgcctataatcccagctactcgggaggctgaggcgggaaaatcgcttgaacctgggaggtggaggttgcaggagttaagtcctgcaatggactcacctattattcccacccccctaacagaggatttcaaagagataatcccccttccatcaatggatgttctcaatattcctacaatggactcctacaatggactcacctattactcccactcccccaacggaggatttcaaagagataaccccccttccatcaatggacgttctcaatattccaatccccaaaaaggacatctccaaaaagatctccatacagtgggctcttctggtcattccacggataaataaatgccttcacggacaacctcttaccatggagtgttccatctcatttatcaaatgaagacaggcattccagaagacctcgtcctaaaaaatggactctcatctccattccataaatgtagaaccactcaatctgacccccttccattcgccaaccatgtctgagacaacaggcatcttgatatgcatagatcccccttctacactaaattctaccattacccctaccccatgaatgggtgtttccaaaaagactcctacctccaaaagatttgctcatctacccttgtagaaaaatgggtctttccagtcttaccaccttctgaaggtagactctcctgttcttcattcctgtctgaaggaatgggatgacccaaaataaaagccccctttctacaatgggctctcctgctccctaacccaggaagggatgctttcttggcacctacagtgaactttcacttcacagccactccatgaatcggcaaaccaaatgaattcctacaatagattcacctggtattcctgcctccaaggaatgaacaattcaaatgaaaccttttttttttaatctcttttttttttttcttttttgagacagggtctctcactctgtcatcagactggagtgcagtggcattatcttggttcactgcagacttgcagactccacctcctgggctcaagtgatcctcctacctcagcctctcaagtagctagaatgacaggcatacaccaccacacctggctaatttttgtttctgtttttcttttttttttttttaagacggagtctctctctgttgcccaggctggagtgcagtggcgcgatctcggctcactacaagctccgcctcccaggttcccgccattctcctgccttagcctcttgagtagctgggactacacgtgcccgccaccacgcccagctaatttttatatttttagtagacatagggtttcaccgtgttagccaggatggtctcgatctcatgacctcgtgatccgcctgcctcagcctcccaaagtgctgagattacaggcatgagccaccgcgcccagcctgttttccgttttttatacagatgaggtctcactatgttgcccaggcttactttgaactgccacctggaagaatatgtccttccaatttgaccaccttcccaaaagagaccttcgtgttctccagccttgtccagaggaatggctgttataatatatgcaatcctcttactacagtgagctctccccatctccttgcccccacaaggaggaatgaattcttccatacaagctctttcctgaagagagtcttaccttctcacccatatacacagtcaagctgcctaacccaattggatctttctgtgaccgtaaaaatggaactgtcgaataagctacaccaccttctttttgtttttcattttttatagagacaaggttttgccattggtcccagctgtacttgtttagcttggctgtaccattgttaaccatcagttggccacaccataaggataattcacccgatcactgcacataaatgaatatttccaataacacattactcactctccctcctggagtgcagtggtgtgatcacagcttactgcagcctagacctccctgggctcaggggattctcctgcctcagcctcctgggtagctgagactacagataggtgccactacatctgggtaatttcttgtccttttttgtagagacaagatttcactgttgcccaggctggtcccaaacttctggtctcaagtgttactcctgctttggcttcccaaagtgctgggattacaggagtgagccactgtgcccagacaacatgttacatttctattagtgcagtaacttcccactgatcctcaaccaccaatcctttcttcctcttttgtaccaatcaagttctgttggtacccagctatgtaaaatagatagaaggatcaataccacctgcctccatcaatagtggtcaaatt[140 bp omitted]catggcgacaccctgtctctactaaaaatgcaaaatttagctgggcatcatggcaggcgcctataatcccagctactcaggaggccgaggcaggagaattgcttgaacctgggaggcagaggttgtagtgagccaagatcgcaccactgcagtccggctgggtgacagactgagaatccatctcaaaaaaaaaaaagtgtgggggggagggggcagtgcactcctacgaagaaaacacaggcttatccagaacgtgatcccaggcaacaaatgacttccctgccctagaaggtggactcccctgttactccctctcaagaaatagattcaagaaatagatatttccaaggggatctttcttttaaa[132 bp omitted]tcatctctactaaaaatacaaaaaaattagctgggcatggtggcgggcgcctgtagtcccagctactcgggaggctgaggcaggagaatggcgtgaacccaggagacagagcttgcagtgagccgagatcgcgccactggagtccagcctgggcgacagagagagactccgacaaaaaaaaaaaagtttattaaaaaaatttattttggagacagggcctttgtgtgtcacccaggctggtgatggtacagtggtgccatcatagctcacggaagcctcgacctcctgagctcaagagatcctcctgcctcagtctcccgagtagctgggaccacaggtgcacaccaccacgcccggcttttttttctttctttttttttttttttgagacagagtcttgctctgtctccctggctggagtgcaatggaacgatcttggctcaccgcaacctctgccttccgggttcaaacgattcccctgcctcagcctcctgagtagctgggattacaggcgtgcgccaccacacccggctaattttgtatttttagtacatacagggtttctccatgttggtcaggttggtcttgaactcccaacctcaggtgatccacccaccaaggcctcccaaagtgctgggataacaggcgtgagccactgcgccaggcctaatttttggtagagacaggatctcactatgttgtccaggctggtctcgaacttttggcctcaagcaattcttccaccttgacctcccaaagtgctgggattatgagagtcagccgcacgcctggcggggatcttctttctacaatggaatctccttaatgaagacagtgctttcctccaactttgaataaagtgaactattccctatttcctcctccattggactctttctcagccatctactctccctctcctgtgaatctctactctggaaccttgagggaccacgccccactagagtacttgaggctagcgcgccccgggccttctgggagttgtagttttgttgctcacccaccaacagatggggtatagggctctgggcgtgcggggctggggcggcggttacctgggcgtcctggtagccctggagcagcaggaagtaggggcggttgctgggggcctggatgaggcactgagtcaactgatcgaagtccccggggtctgcagttccgatttgggcgtcggctgcccctggggccatgctaagtgcctgctgtctccgctcctgctgccgccgccgccgcccctgaaggctaagctccgacacgctgcgccgcaaagacaagttttctgagcgctccttgcctccagacccagctggggcccctgatccggtccccgggccaggactggccagcgctgccccacccgacgccgcccgggagcggttcttctgtggccgccacgaaggggcgccggtgcctgcggagagatggagaacagtgaggctgagcctggaaagacagggatagacacagagctgcagattatgagacaaagaactggttgcagagaggtgaggctgcttcccacatttaggatttaggcttttgcatattctgttccctgtgcgtggaacacctttctgtcctgattaatacccatcttgcagttttcagctcaggaatttcattcattctt[136 bp omitted]tgcctcagcctcccaagtagctgggattacaggcgcgcaccacaacgcccggttaatttttgtatttttagtatagatgggttttcaccatgttggccaggctggtctcggactggtcggtctcgaactcctgaccttgtgatcctcccgtctcagcctcccaaagtgctgggattacaggcatgagccacagcgcccagcccatttgttcttttaacaagtatttaggccgggtgcggtggctcacgcgtgtaatcccagcactttgggaggct[134 bp omitted]tggcgtgaacccgggaggcggagcttgcagtgagccgagatcgtgccactgcactctagcctgggcgacagagcaagactccgtctcaaaaaacaaaacaaaacaaaacaagtatttattgactacctactacatgcttagaactgttcaagtcactggataacagagaagaccctgccctccaggagattgaaaccacctcttcctaaacacccttccctgacagtccaagttgaagcaggtgactgcaccactgggtactctgagctttttctggacccagctggaaccctggcacacagtaggcaccaaggggaaatgagctgaatgaatggactgatgtgtttcccactaggcttgtgagatatgggagggtggaaacctcatctgtcaacgtccccactgtattccccagtgccccgaaaactgtgtggccaggctgggcgcggtggctcacgcctgtaatcccagtactttgggaggctgaggtgggtggatcacttgaggtcaggaattcgagaccagcctgaccaacatggcgaaacccccatctctactcaaaatacaaaaaatcagccaggcgtggtagtgggcacctgtaatcccagctattcgggaggctgaggcaggagaattgcttgaaccgggaggtggaggtcgcagtgagccatgatcgtgccactgcactccagcctgggcaacagagcaagactccatctcgaacaacaacgacaacaacaacaaaaaaacaaaaaggaaaatgtgtggcctacaccaggtgctcaatggatactttgtcgagggggtggcggagacaatgcttataatcgtcattctttattaagcacctactctgtgccaagccctgtgctaggccctttatatacattgaatatattatcccattgaatcctcacctaggattttactgagattaactggcacagaatgggttggaattcaaaccccagttcaaagcccatcagttgaattgctacaacattctatctcccaaaaggaagctcagatacagaaaagcgtttagaaggctccctgagcagacccgtgctttcaatgcgccaggccccacccctgccaggcgcggtccaccaccagctgtttgaccattgactctaccttctgttccaggccttccttcgcctctacagtgatatcttccttcagccccttcctttcccatgtgatcccacttggcagccaacccagcctaaggccgtcttatccaaggccggcccctcagcggctccgcccatcttagtcccagcaggcctgatctaggaacctgtattcactcactctgcaggtgtcgcccccttctatactccacccacataggccctgctcagtagccacctcaacctacttggcagagctgcctcctaccacagagacccatgctcaccacatgccaccactcctcgcgggacccaacagtttttgccccagaccacgcttttccacaagccccgccccaccacaggccccgccccacaacatgccccgcccatctgctctgcatcgctcccaagaacattgtccgtgcttactcttccggctcctaggtctccaattcctttttctttttctggaggacagttttttgtttgtttgtttgtttgttttttcgagacgaagtctcgctctgtcccccaggctggagttcagtggcgcgatcttggctcactgcagcctctgcctcctgggttcaaattattctcatgtctcggcctcccgagtagctgggattacaggcatgcgtcaccacgctcggctaatttttgtatttttagaagagacaggatttcaccatgttggcc[131 bp omitted]cagtatcaaaacagttgcactattgatttctctttctcctaattggccccaagagaccacatcaaaggagagtacagtttaagccattaagctgcaggatgtacacctaacagacctcgcagaaaccttaccagaaagtggggattggttagagaaaggaactttcaaagatcagcaaattgctagtgtcctctaacctaccacacagggcgaatcccttaggcccctgcggactcctgcccattccactggactccacaaacgctcctcaggatctactactccgcagaccccgctacacaccccacctcctccaaggcagtctgaaatgcctgcagaaggccctaaccccaattcggagccacttcaggccactccaagccaccaccagcaaccagcccccgtcccgcctaagccccaagcttggcccctgtaaaactcctgctcaatcaacaagccccacccaactctcaggcccgcccatctggccgcccccggccctgctctagctctgcctagagtccaacacgcaccgtccagtcccctcccagtcccctcccgcgggccccgcccccagccagcccgcgagtcccacaagccccgcccaggccccgccccacggaccccgcctctctggcaccgagtccccgccccagagccccgcccgccgctcaccttcgctgtccgcggccccgaaggcctcctgctccaggcgccgcgcctcctcgcggccgcgcaactcgaagcgccgcgcccagccgggccgcgcccgccacagctcctgcaccagcagcgggcgctcggagtcgcccagcacgcgcaggtgctccgcccgccactcgccgcttcccacgcccgccgccgcgggccggcccagagcgtcgcacaaagcgaaggcgtccacgcagctgctctcgccggggccaccgccggggctgcctgctaggccgtagcgctctagcgcctcggccacgagctcgcgcgccgtggagcgcgccgtggccagcacgctcttgtagttggcgcccgatgccagtccggcgccgaagatcttgaggacccccggaggcgccgtggcgcgggtagccagcgggggctcgggggccacgcccgccgccagctccggcagcttcttctcgctggcccagcgctgcgcgccccccggggtcccagggcctcctgcgccgctggaccccgtggtcccggtccccgagccccggaagagctgggagatgcgcttggcgcggctaccggaggctcccccggccgccttgacagcgcccactcgccgcagctccacgtgcggcgggggcggaggtagcggctcgctgctgcggctccccgtgtccgacgaagaagacctgggagtccgccggggaacagagtcgcgggagagagacccaggacgacacgccaagacgggggtgggggcatattaggagggaagtgggcagagacccagagggaggacagggacccagggtggatggacggggcgggggtgagggtggggacagacgcgaggcaaagagagagagaaaaaataaataaataaaggcaagtcccacagtaggaaattccaagaggtgagcagggaggggaggaaggaaggtgaatcaatccccctgctccttctgtccccgtccccgtgcccatccggcctcactccacctcctagcctagctcttactcccaccgcgccctggtatcactgtgccccaccgtctccccctgcccaccagctcgtttgcccaattcaggatgaggaccggagccaacactttgcagggactgggcagtgaacagggacagatgggaagcaggtgtgcaggggcaggagtcctgcagagatggcactcacttgacagaggctgcgctgggccagcgccgccccagcttcgccagctgcttcctgggggaattgatccacaggcccacggggagatgaagcttcccgaagcgggggcttccgccctccttccgttcaccagacagcatggccctaagggaaggcgggtaaggccccaactcctaaggcattcttgtggggatggggtggagggaacctggactccgagtcagagggaggagggggctggggctcagacttgcgagtccagggggaggagagggatggtaccctggattcctgggtcctgggatggaagatggctgggggactgagtcttggggcccagggaggaggggtttgggctgctgggtccctggctcttaccctgcttcgggtccggcacacccggaggccctggctccactggcctgggtcagttccactgctcttgcctctgccacggctcccagcactgggtgggggacaggaaaaggcaagaggaaacccggcaggaagagcggggagggggcgtcctgtgaggagaccaggcctgggggaggagatctgggtagggttggccctgccccattccttgattctggaattacatcgcagtcagttggtcccctccaggacccaagggtcccggttttctgcccttcctccctcaggccggagcccatccccagacctctcctctcggggaaccaaaggctagaatcagtcccgtcccggggagtgagtcagatgcttagacaacaagataaatctttattgttgcctcgaatctgtggccttttcttttgggacctgggtttgctcggccgctccactgccaaggccaaacagtgaggatttgatgaaatcgatcaccttccttcgacgaaatatcctaggggtgggagtggggtgcagatcatggaaccggtttgggtactaattgtgtgggggacacccctcccaacctccccctttgtgaccttattctagcaattacctaagcctcgcccttcgaagtcctcctattcaagccccccgcactccatccccaggaaagtcctgctctcaggcctcagtagcccccagaccagcttctgtgttgggttcctggaagccccgccccttactccaagccaagcctgtcttcttcaatgggttgcttacgcaaaggtaaggccggttatcagtgctagggagccgcagatcagcagccccagaaggcggcttgccagcattttctcgggctgcagaggctggaggcttatggacgactccgtggtcgcctcccccggggttacgatatttggagaaggtttttcctccttgatcattttgggcaacactgttagagaaagcgtaaagagcagtcctggcagggcgtggagttcctgccctggcaaagacaagcccgtcccagtagccggccatcccagagataatcacgccttcaacagtgtcaagcctgaacacacccaagggaacccctgtcctcggggccagaggccacgcccccggcaggaagccacaccccgtgccccgaaaccacacccaacaggaagtcacgcccccatcgccaaggccacgcccccgccgcggaccccagctttcctgggccctgaatcctacacttctctcagccccacagcactgacctgtgacgtgaaaattgatgatcgtggctgggctggaattcacagagcccagctcgcagcggtagctgcctgcatcctctggacccaccatgggcttggtcagggtggcctctttccccttggacaccaaggtctccgtattgttcccccaaacctagacccaagctcaaggggtcactgaggcctgaggaattcaggggttgggggagtacaggggtgagaagatcacagggcctcagtgtgggaggtgagtgtccagggtgtcactggtcagggcacggggtccccagaggtctgtagagaccacacctaatagaccaccctcctgggtcatgagaatcgtgggtgcaggcccatagatccagaacacaagtattgtagtctagggagttcaagggttacagaagttgaggccctcaccctgtaaaagctgtaatcagtgaggccttccgaagcctgatgccagtttaactcacagtccaggatcatgtcttccatttgaggaacttccacattccgctctgggggtgggggatgaccatgggacactcatgattctgtttttgtttttgtttttgagatggagactcgctctgtcgcccaggctggaatgcattggcgcgatctcggctcactgcaacctccgcttcctgggttcaagcgattctcttgcctcagcctcctgagtatctgggactacaggcgcttgccaccacgcctggctaatttttgtatttttagtagagatggggtttcaccatattggacaggctggtctggaactcctgacctcaggtgatctgcctgcctcagcatcccaaagtgctgcgattacaggcatgaggcactgcgccgggcctccttcacggttctttaccctcccctaatcctttacatttgttgtaacctcgtcttttctcttttctttctctctctctttttttttttttttttttttagatgaagtctcactctgtcacccaggctggagtgcagtggcgcgatcttatctcactacaaccttcgcctcctgagttcaagcaattctctgcttcagcctcctgagtagctgggattacaggtgcccaccaccatgtctggctaatttttttgtatttttagtacaaaaacgatggtttcaccatcttggccaggctggtcttgaactcctgaccttgtgatccacctgcctcggcctcccaaagtgctgggactacaggcgtgagccagcgcgcccggcctcttttttttctttttagacaaggtctcactcttttgcctgggctggagtgcagtggtatgatcatagcttactgcagtctccaactcctgggtccaagcaatcctcctgcctcagccttccaagtagctgggactacaggaacgcaacaccacacctgactaatttttaaatttttttgtagagatagagtctcgctatgttgcccaggctggtctcaaactcctggcttcccaatcctcccgtctcagcctctcgaagtgcgagactataggtgtgaaccactgcacctggcctaaaccctaccttttcttgtctactgcccccacacccccatctaggctctctctagactgcctctcctctcgccccaccccacctgcaccaattcctcctgctgggtccagttctctcacccccgcaatcgtaggactttcgacaagcgtgaacctcctttttgcagttcttgcaccagatcagagtttgcaacatcacacctggaggggcagggtcaaggcttgtatttgcccactaaggggcatggctaaaaggagaggtcagggctaagggctggggccagatcatctatgacattcctagatggtcagacgaaggcacaggaccaggacgcaggtaagtagtaagtgggctcc[135 bp omitted]cccgtctctgctaaaaatacaaaaattagctgggtgtgatggcgggcacctgtaatcccagctactcagggggctgaggcaggagaatagtttgaacctgggaggtggaggttgcagtgagccgtgatcgtgccactgcactccagcctgggtgacagggtgagactgtctcaaaaaaaagagtgtaagtagaatatgacctgctccccaagaaatccatggtgcagaaagaatactggagacccaggaacctctccaaggcagagaatgacaaaaccaccaggatccaaaaaggcgagtggggaggttgactattcagagggcaggatgagggttaacttctgtaatccagactcaccacatttgttgggacaataagctgtgtcaaaagagaaaaaaagagagcaagaaagagatgacagagtcagatttctaaatgaaagacgatggaagagggggttgggggaagagctgggctttgggcttttgggttcgagggagaaaagacttgggtctgaaggaggaggcagttggggaagctgaggaactgggcttggagaagtaaggggctggagacaaggactcttggatagtggaaagaggagctgggggacaccgactcccatcttctctcaccctctttttggaatcgagcaacataggtggcaaaggtttccttttgcaagtgcaacatccaaaatagctccttcacgaagagatcgcctgggaagacacaggaacccccaatcccacgtgtgaggtgttggaagtttacttctgcctgcagagtctggcagtctacttcctggccttctcaggaaagggcgctacaactgaccgtctaacataatgccagctgctgggctaggcaatgcatattttgggggatgggggagggtcttaccctgccacccaggctggagtgtgtggtgtaatcgtggctcactgaagcctcaaactcctggactcaagcaatccccccgcctcaaccccccaagtagctaggactacaggcacacaccaccatgcccagctaatatgtatacatatgtctattttttgtagagacaaggtttcaccatgttggccaggctggtcttgaactactgagctcaagtaatctgcctgcctcagccttccaaagtgccaggattacaggcctgagctaccgtgcccggccagcaatacacatttaaactgaacaactgaggaagcattttagagccaagggagcttcaaagtcctttgctcaaggccgtacagctaggaagtggcagagcaggcattggaatctaggcggtctgggtccacagcctagtatctgaccaagagaccaggcatcactaacgctggcttctctgagagattcgggactcccacccccttgatgcatttaccttttacatcactgtctgtgatgcgtttcagatccttcagcaaactccaggaccccttttgcagtgtggcctcatctgtcagaggagatataaccccagattccagccttactgtctcattggcgcgcctaatcttagaaactacaatacccatgaggccactgggcaaagataggcctggttaaggactcagccgcccgttgccttctgggagttgtagttttattacataaaattgccagccgaggatagggaaaacggtatttactagcctcggggaacctcggaatctgcatctcagccttctccattcccgaatcccggagaccctgctgtcagcctcttccttcccctggtcttatctccctcctttcccaggacccaggggtccgtggtcccccctgccctcaccaacgacccccatataggcatcctcattaagcgacagttcctggaaatccttcacggcattctctaccctttccatcatggctttgtgatgcttcgcatccaggtggccaggcaggtaatctttctccagggactttagcgccagcacgacagacgggtcacatataacacacccctcggcaggaagcaagcaaccggccagcgccgcacacaggagggtaaaatgcggccccattgcagccggcgcgcacagttcccgaagaccgttaggaagggtgctctcaccccaaaccgagagcaggagaacgctaaacggagaaaagccaaaatccatcttaagaaatcccactgggccgcctatccatggggtccgcaaacctcgaaaagaggatcttcaggaaatctccaaataaagaggacctatgtccttcatcaaatgcctccgaagtgtgaaactgagccccaatccaggggacccaaaatttagggttctcactgaatcccccaactgagagatcagaaaaactattaaacaggaatcactcataagtccccaaactcagaacctggaatctcccaaccccatgcgccccttcccaaaatcccaaactgtggaattttccaagtccccagattgacgtgagcctgaactccaacccttaagagcaacaccgaggcactcccccgccagccccccaaaacctgttgaacctcaagctgaagattcaatgcccaaaccaataaacatctaacacagacccaaccacgatattatcaaactcggaactccttcaaaaccaaaacacataccagattcctagaactgaggaccccactaacacttaagcgagactccatgcggtcctctagacctagggggcccttgttcacccttccccaaaactaacgggctcccaatttgcagggcgcacccttccgcttagaaaaaggagccccgatgcatcctgaacagtgatgcaccctaaacagccgctccccgaccttggttcccgatttgtggcctctaacactagggttcattgaggagcccggtccaggttctgagggcttttaaagaggaagccggggtcatgaccacctacgctaattttcccaggggtaaaatcaaggattgtgttggggacgagggtaaggttggttgcgtgaaatcgagagcttttcgacggggtctgagtcacggacgatcccctctccacaaggaactcctgaaaccaccccctccgagcttctcacgtaggggcccgaattcctttatagatattccttggggttttcctcggccccacccagaaactcaactctgtctgattggactgcaacaaagggaggtcccgcccatcgctccatgacgtcacagaggctgcagcctttttggactagaattttcccagcatctagggaagaggaagcctcctgactactctggcttccagagtcaaggaccggactcaggccttcagtttcctcccctccccttgccccaggacccaggctttgggctagatccggccccccaggccgctgccgcccccaccgcggtccttggaaacggctgtcgagccacgaagtggacattttagccctaagactacaactcccaaaatgccctggggcctctttctctgtagctgactgacgctgccaacctcatagctttccgggaaatgtagttcagtgataatccgctccctcctccgcctcttctgcccacgcggaggtcccagtgggaggagaggactgggggccaatactgacagtccaggagtgagcaactgggggctcagacgttagggtcctggaaggtctctctctcctgtgtgatagaaacagggaaccagaaaaacagggaccacaactcacacaagtccagcaacaaggggctgtcagatctaagtagggacagtactcccaatcacgagtaataaaaatcctcagggcccggcgcggtggctcacgcttgtaattccagcgctttgggaggccg[134 bp omitted]gaggcaccagaatccgagaggtgggagtttgcagtgggccgagatcacactactgcactccagcctgggccacagagcaagactcgatctctgaaaaaaaataaattaattaaaaaaaaataaaagtcttcagaagtaccccaccttttcctccactctcttacacacacacacacacacacacacacacaaacccacacacacatacacagtggctctggctccaaaaaagctacagagacacgggttagtgctgtagacttttaattcatacctcctgctctctcacccgtggcagctgagttgggaacagtactgtaacaattgtaactgtaactccctgataagcctacaggcatggggtctggatgagtagacaggggatgtgatcagagctgactatgtttaaggtttcttctttcaccctccaaaaaacagcaaggggctcctgagatctcgacaaccccgtccaccttggccagacctcgtgctcctgcctggatctgaggctgggtccagggtctgcctacctttagatcgttttatctcagacctgcccaaagccagatgtagtggttctgggagttcagggacagacagtggttagcaatgagcacggtacctgccagtttgtcacaagcacagagggtgtgtttatacctgcacacttccagaaaacagatcccagaccctcagcagcccacctgcagacaaagaccaacttccttcattgtgagaggcaacctgaactcacacccaatatatggagctcttggcagtttatgagctttaaaaaaaagtgtccctggatccctggaaagttctgctccagaagctgtaccattttggcagtgatccctcaccccacgttcacattttagcctgtctgctcaaaacaaacaaaaaaaagtctttgaggggctgtggggcttgttggacagagtcccgctctgctcaccaactaccccagcttttccagagactgtgaacagagcaagacgctggccaactagagatggtttgttttccatctcaatttttccagcaatggtggaacattcattagatgctacaattaggttgcacattcattagattcttcacttggcccggtgtgctggctcacatctataaacccagcattctgggaggccaaggtgggaggactgcttgagcccaggagttgaagaacagcctgggcaatatcacaagacctcgtctctacaaaaattaaaaaaaattatccgggccaggc[176 bp omitted]gaggcagaatggcatgaacccgggaggcagagcttgcagtgagctgagatcgcgccactgcactctggcctgggctacagagcaagactccgtctcaataaataaataaataaataaataattaaaaaaaaaatatccgggctgggcacagtggctcatgccagtaatcccagcactttgggaggccaagacaggtggatgacaaggtcaggagatcgagaccatcctggccaacatggtgaaaccctgtctctactaaaaatacaaaaattagccaggcataatggcctgtgcctgtagtcccatctactcaggaggctgagacaggagaatcgcttgaacacaggaggcggaagttgcagtgagccaagatcacgccactgcactccagcctgggcaacagagcgagaccctgtctccaaaaaaaaaaaaaaaaaactaaaaagattcttcaccttagttatctggatttccagaaccccatcctgtccataagggccctgcagggttcttcacaggcatcaaacctggtcctctctagaacaagtctccctctagaatcactccagaaacacagaaggggacttggtgaatgcttgctctggagcaatcatatgctccttcagtctttggaggacccaggggagaagtaacccctcttctagagtagaccagagggagagttccccattcctgggggcagccatctggaagtactgtagatatgggctgggaagagcaggtgggcactgtggcttctagaactgcctgccagccatcaggaaaagatgttttgctagttctagaatattcagacagttccagaaacgtcccccttctctccaactctcccaactagaatcactctggatacgggcacccatttgcttcaggaacaccacaagcttctccagaagatgccaggcctctgaagccacgtactgctggctctagaaagatcaggctacttcagaaagtctccctggctctcaaggcttagccaatgtccagagtggagacaagtctgcattaatgcccacccactcgggcaggaaggccgcctccggcttaaagatcttcaggaactcagagtctggcagggtgaagttggccaggtagacagtgtctccgccagccaggtaggcagcccagaagccgaaggtgccaatggtcataatggtgtggttgcactgtgtgagcagggcaaagtctttccacggtgtagcctcctgtccatcgccagcaaacgtcacatcgccctgggaggtgtcgatgttttctttacaccactccatgccgttgctggtgaccacgaaaacgggggcttcgtgccgtgcccggaaccagtccatggcctgccggaggtaggcgctgtcgcccaccacacccttccagcgctgaggcataacctgcagatagtccccacggcgcacgtggacgccgacaaaggtgcgcgggcggtcccctgtgcggcccaggcggagctgacccagcacactctgcgcctcttcccgaaggtggtcgtgcagggtgaactctctgcggatctgttcccggagatggtggaagaaagtccaagagcaggggaagccagagagcttcaggaaaggatctctcaagtccgcgtactcctccgacatccagtcgtgaagctgcagctcccgccacggcgtgcggctgtccacttctggggccagcacgggcagggtgatgcggaataccggggccagggcggcatgcatggcaggcaggataaaggcccggcggccgttgagctgggccagagccagcagcgtggcatactgtcccatctgattaccaaaccggccattggggtagacagtccaggtgccggagagggaagcagggtgctggggacaggaagaggaggcgttggggcccatcgcagtacccggcaggcagaagatggccactgggggtgtcaccaggcggcggtctggacacaggatcgacaggcctaggccatgtggaaagctgtcttgatggatatggaggaagaagattacagagaggacacagactagcaggaaggccaggcagagctgacgatggctccggagccacatggctgcaggggaggaaaggcgaattagcaaatgctctgaggctgaggaggggaggctgaggagggatgtggggtaagggaggcgcctggggtgcagcactccttagtcccagggaaagaggaagttaaaggtttagactcctggggctgaggtagggagagcctgagtcctaggtttcagggatgagagccttggaatttcggggcatggggactggaagacaagtggttttcaagatagccatggtttggctgggcactgtggctcacacctgtaatcccagcatattgggaggctgagatgggaggatcccttgagcccaggagttcaagatcagcctgggcaacagagcactcttacaaaaaaattttaaaattagcttggcatgggccaggcgcggtggctcacacctgtaaccccagcactttgggaggccaaggtgggtggatcacctgaggttgggagttcgagaccagcctgaccaacgtggagaaaccctgtctctacttaaaatacaaaattagccgggcatggtggcgcatgcctgtaatcccagccactcgggaggctgaggcaggagaatcgcctgaacccggggggcgggagttgcggtgagctgagatcatgccattacactccagcctgggcaacaagagtgaaactccgtctccaaaaaaaaataaataaaattagcttggcatggtggcacatgtctgtggtctcagctacaccggatgctaaggcgggaggatccccggagctcacaatgagccgcgatagcaccgctgactgcactccagcttgcgcgacagagagggaccctgtcttaaaaaaaaaaaaaaaaaaaaaaaaagaaagtggtccaggttcctacacctttcctgaaggaatctcgagtctcccctcctgtaagttccgctgatactggactcttccaccagcctgtttctcaggagtacctgtctgtgaggcgcaaaatccaccacagaggtggtgatgggaaacgatagttcaagtaaaacaagagaggctggagggtcaggagcggaaggagcatcttggttcctggaggagtaatggctggggaggtggcggagattcctagggccttaggaagacctggagaagaggttgggggtgcacctcctggttctgaaggagttgttcctgggtcccaggaacaactgagtggggcagtccccacttacccgagctgcttgcaggtggcagatccacagtccgcttttcgtggccggagcgcaccctccgcaaaggcaggccacatccggccgcccctggaacgccaggcgtccggctatccggcccggcagccctcccctccgcgcagcctgtccggactggcagcgagggcttggggaggagaggaaggagagggcgcggccgggagtctcgcagcgtccgccctcccgggccgggcggatggctggaaggtggagccccgcccgtcacttggcgccgagccccagcgccaggggctaaggcgatggcccctgggcccaccgctccccagatcggggatgcaggggaccgcgccctgcccctccgccccgtcattgacctgcgcgaaggcttcacccagggcaggctacctggcttctgagcagccgcagcatcattgcgtggaccaggagacggagcgcccagttgcaatgctggagccgggaggtccaatccgccgccctctctcttccggtgccagggcttagagtcggcccccgacacctgggtgcttcgagcctggccacgccccagcggctgggcagggcccccgcacctggtcccggcgagtggagcgatcgtccgccctctgccgcgtcctcctgggggatggagaacctgtttgccaggctgccgccggagcgcgcgagggcctccagcctgcaggtgctcccgcgcccaccagggtctccgatctcccacaccccccgcctcaccgtccacactcaaattccagaatcccagcccctagtcactccttttggggaattctagggtcccgtgccaaactgctactttccagacctgcactgcacgaaggcaaccattccaaggctggagaccggagtggaacagggtctgtttcccacgccgtcagcgggggccgtggctgccggcgccagagacaaaggcctctgcccgcttgtcacctaattaaagcattttctctggtccaaggcccacctccagcatcgccaaccccgagcagggcaggctaacgtagggtccagccctacggggctttgcgggtgggtgttcttcccctgtgaggagaggagagattgtaagaaataaagacacaagacaaagagataaagagaaaacagctgggcccgggggaccactaccatcaagacgcagagaccggtagtggccccgaatggctgggcgcgctgatatttattgtatacaagacaagggggggcaggataaggagggtgagtcgtccaaatgactgataaggtcaagcaagtcacgtgatcatgggacagggggcccttcccttttaggcagccgaagcagaaagagaaggcagcatatgtcagcgttttcttctctgc[139 bp omitted]cggtgaaaccctgtctctactaaaaatacaaaaaattatccgggcgcgtggtggagggcgcctgtagtcctagctatttgggagggtgaggcaggagaatggtgtgaacccaggaggcggagattgcagtgagccgagatcacgccactgcactccagcctgggggacagagcgagactccgcctcaaaaaaaaaaaaaaaaaggctttcactatttcttctaccgctatctactacgaacttcaaagaggaaccaggagtacgggaggaaaatgcaagaggacaaggagcgtgaccattgaagcacagcacagcaggatgactgcgggcaggcctagataatacccagcctcccacaagaagctggtggagcagagtgttccctgactcctccaagaaaaggagattccctttcgtggtctgctgagtaacgggtgccttcccagacactggcgttcccgcttgaccaaggagccctcaagaggcccttatgccggtgtgacagaaggctcacctcttgccttctaggtcacttctcacaatgtcccttcagtacctgaccctatacccaccggttgtttcctggttatattagttatacaacaaagaataaaagtaatagctaatgattaataatgtttacactaatgattgatactgtccatgatcatctctatatctaatttgtatgataactattcttattctaactattttctttattatactgaaacagtttgtgccttcagtctcttgcctcggcacctgggtaatccttccccacagactgaccctcccattcaagatacatcaatgtcaaagactcaggagtttgacttgattcccagaagtttaaccatcatctccccaggctcgggactcccagcacccagacccttctgctcacacccagcagtccaggcccccagaccctcctccctcagacttaggagtccaggctcccggcccctccttcctcagacccaggagtccaagccccctgcccctccttcctcagacccaggagtccaggaccccagcccctccttcctcacacccacgagtccagatccctagcccctactccctcagacccaggagtccagaccaaagctccctcctccctcagacccaggagcccaagttccccagcccctcctccctcagatccaggagtacaggcccagaccctcctccctcagacccaggagtccaggccccccacccctcctccctcagacccaggagtccagagccccagccctcctccctcagacacagaaggcctacccttgcacccttaggggctccaggaaattagccaacctgtcttccctctgggtgcccactccagggcctggcttggctgccaactccagtcagggactttcagccacccctccccccaggttatttcaggagcacctgcctgggcctgggatggcttctctggtgaaagaaacaccaggattgcatcagggaggaggaggctgggatgtccagggtctgagcatctgagcagggacagatgaggttgaggttggcccacggccaggtgagaggcttccaaggcaggatacttgtgtctcagatgcggtcgcttctttcatacagcaattgccgccttgctgaggatcaaggaacctcagtgtcagatcacgccctccccccaaacttagaaattcagatggggcgcagaaatttctcttgttctgcgtgatctgcatagatggtccaagaggtggtttttccaggagcccagcacccctcctccctccgactcaggtgcttgagaccccagatccttctctctgagactcaggaatgtgggcccccagcccctttcacctgggtcccagctaacccgatcctcccctccctcatcccctagacccaggagtctggccctccattgaaaggaccccaggttacatcatccattcaggctgcccttgccacgatggaattctgtagctcctgccaaatgggtcaaatatcatggttcaggcgcagggagggtgattgggcgggcctgtctgggtataaattctggagcttctgcatctatcccaaaaaacaagggtgttctgtcagctgaggatccagccgaaagaggagccaggcactcaggccacctgagtctactcacctggacaactggaatctggcaccaattctaaaccactcagcttctccgagctcacaccccggagatcacctgaggacccgagccattgatggactcggacgagaccgggttcgagcactcaggactgtgggtttctgtgctggctggtcttctgctgggagcctgccaggcacaccccatccctgactccagtcctctcctgcaattcgggggccaagtccggcagcggtacctctacacagatgatgcccagcagacagaagcccacctggagatcagggaggatgggacggtggggggcgctgctgaccagagccccgaaagtgagtgtgggccagagcctgggtctgagggaggaggggctgtgggtctggattcctgggtctgagggaggaggggctgggggccttggcccctgggtctgagggaggaggggctggggatctggactcctgggtctgagggaggaggggctggggatctgggcccctgggtctgagggaggaggggctgggtctggacccctgggtctgagggaggaggggctgggggtctggactcttgggtttgaaggaggaagggctggggtcctggactcttgggtctgagttgggagggggctttggcttgggcttctcctgggtctgagggaggaggtaggctgtgggcttggactcccagggctgggacagagccggatggtgggacagagtcgggtggtgggacagtcccgggtgggagaggtcctcgaaccaccttatcgctttcaccccttaggtctcctgcagctgaaagccttgaagccgggagttattcaaatcttgggagtcaagacatccaggttcctgtgccagcggccagatggggccctgtatggatcggtgagtttccaggaccctcctcaccacccaccatgctcctcctatatgtcgccctcacagcctggggtgccttgtcttgctcatcccccccggagccagacttgattctatttgctctgcacgcccccagctgcaacatttggaggttgaagttgtcatcagtgtttgcaagatgaggaaactgaggcccaggccggggcgccagtgacctcaatcatgtgatgtgtggatgctggagcggcctgaggctcaggttattgggagtctcgtgattcagtaacccctgctcctgcccacacggcccctgtgtgcacggctcatgctgggcacagggacactcggggaagccatggccagtaaagtgaccaggaccttgagtgctagggagacaccccgcctggcctgagagagcactgatggctccgagggctggaatgttctctgtgaagtctgaactgggaggcaggtccctgcaggagagccctggggtaaaaaacaaaacctgccttgctgttttgtttcctagaggaggggctgggggcctggactcctgggtctgagggaggaggggctgggggcctggacccctgggtctgagggaggaggggctggggcctggaaccccgggtctgagggaggagaggctggggcctggaaccccgggtctgagggaggagaggctggggcctggaaccccgggtctgagggaggaggcgctgggggcctggactcctgggtcggatggaggagaaactagggtctggacccctgggtctgagggaggaggcgctgggggcctggacccctgggtctgagggaggcagggctggggcctggatcctgggtcttacatcaggaaaacagaggaaccctgtctctgatcctgtttttgtcccctagctccactttgaccctgaggcctgcagcttccgggagctgcttcttgaggacggatacaatgtttaccagtccgaagcccacggcctcccgctgcacctgccagggaacaagtccccacaccgggaccctgcaccccgaggaccagctcgcttcctgccactaccaggcctgccccccgcactcccggagccacccggaatcctggccccccagccccccgatgtgggctcctcggaccctctgagcatggtgggaccttcccagggccgaagccccagctacgcttcctgaagccagaggctgtttactatgacatctcctctttatttattaggttatttatcttatttatttttttatttttcttacttgagataataaagagttccagaggaggataagaatgagcatgtgtgagtgtctgagggaagacatggcagctgttttgtctcccttggcccggacaatcccctctacacctcccctcacgtggtccgagggtcctggcttcccactgggcctcacttttttcttttcttttctttttttttttttgagacggagtctcgctctgtcacccaggctggagtgcagtggcgcgatcttggctcactccaacctccgcctcccaggttcaagcaattctcctgcctcagccacccgagtagctgtgattacaggcgtgcgccaccacacccagctaattttgtaattttagtagagacagggtttcgccatgttggccaggatgctctccatctcttgacttcatgacctgcctgccttggcctcccaaagtgctgggattacaggcttgagtcactgtgcccagcccagcctcacttttctactctgctaaagtgtccccagggactgt[213 bp omitted]aggctgaggcagaatggcgtgaatgcgggaggcggagcttgcagtgagccgagatcgcgccactgcactccagcccaggccacagagcgagattccatctcaaaaaaataaataaataaataaataaataaataaatataaaaataaaatgaaagagcaggacttctttctacaacccctcaacttgtgtgagcgttgtgtaactatttcatagagctacctcgataacaggggagcttttacgaggtgacacagcacactcacatcctcatgggagatgtagttttctggcatcatttagcagcaggaatgagatctgttgggcctcaaatctgggacaaggactcctgggtcctggagtaggtttggggctagtgtaacacccaagttctggggaatcagtgggctggacatctggacacctggatcacaggagaactggggactgcagacttaggcatcctggtctgagaaaaaaggggctggagggtgggagtttgggttctcaggaaaaggagctgaaacctggaattcttccatctgggtccttatgaactttttaatatttatttatttatttatcttattttgttttttttctgagatggagtctcgctctgtcaccaggcccaagtgcagtggcacaatctcggctccctgcaacctccgtctcctgggttcaagcgattctcctgccttagcctcccgagtagctgggactacagacaagcgccaccacacccgtttgtttgtttgattgcttgtttgtttgttttgagacagagtttccctcttgttgccaaggctggagtgcaatggcacaatctcggctcaccacaatctccgcctcccggcttcaagtgattctcctgcctcagcctcccgagtagctgggattatgggcatgcgccaccatgcccagataattttgtatttttagtagagatggggtttctccatgttggtcaggctggtctcgaactccccacctcaggtgatccgcccgcctcagcctcccaaagtgctggggttataggcgtgagccaccacgcctggctgcttgttttttgagacagagtctcgctctgttgcccaggctggagtgcagtggcacaatcttggttcactgccacctctgtctcctgggcttaagcgattctcagctctggagtagctaggattacaggcaccaccactatggccagctaatttttgtgtttttagtagagacggggtttcaccatgttggtcaggctggtctcaaattcttgacctcaagtgatctgcccaccttggcctctcaaagtgctgggattacaggcgtgagatactgcacccggcgtttacttttatttatttgtttgtttgtttgtttatttttgagacagagtctctctctgccacccaggctggagtgcagtggtgcaatctcagctcactgcaacctccacctcctgtattcaagcgattctcctgtctcagcctcccaagtagctgggattacaggtgtgtgccaaccctcccggcttggacttcagctgggactccttccatgggggtccttatgtaatgagcgtcatagattccagtcccggcaagcaagttgcccggtctcgctcccctcacgcaaccgagatttccatattgttcttcaagccacttcctggtaggaaggaagctggcctgggccagccccagttgctgcagccgggtgggagttgtcatcctggacccttcattttaagtccaaagttcaagtgagagaaatatcacagtcaaaaggacctaactgtgggtggccgagggtcactggagggacttgatgcccagaaaaaatgaaagtcaccatttgtagaaagggtagttttcaactctgatcacacaagcctggctcagtcaagggaaggaaatagaatttgaaatttcacaaagctcccgagcagtggtttaggtcctgggggtgactcaggtgacacgtaagttccttgtcagaagagaccgcatactgctgtcaaggaaaggcgaggtggccagtgtggaaagaggagggagcactgggcaccatcctgacccggttcccacccgcccgccatgccaggctggagaccaggagacacagacccagagggaaggtcagagcccaacatccagagagaaggggggacagggacctgatgggggggtcagagacccagagatagggagacagagacccagagagagagggagagtcccagagagagggagacagagacccagagagagagggcaacagagacccagagagagagggggacagagacccagagagagagggagacagagacccagagagagagggggacagagacccagagagagagggggacagagacccagagagagagggggacagagacccagagagggggacagagacccagggaaaaaggaagacagagactcagagagagaaggggacagagacccagagagagagggagagtcccagagagagggagacagagacccagagagaaagggggacaaagacccagagagagagggggacagagacccagagagagaggggaacagagacccagggaaaaaggaagacagagactcagagagagaaggggacagagacccagagagagagggggacagagacccagagagagagggggacagagacccagggaaaaaggaagacagagactcagagagagtaggggacagagacccagagagagagggagagtcccagagagagggagacagagacacagagagaaagggggacaaagacccagagagagggggggacagagacccagagagagagggggacagagacccagagagagagggggatagagacccagagagagagggggacagagacccagagagagggggggcagagacccagggaaaaaggaagacagagactcagagagagggacagagacccagaggaaggggggggacagagacccagagagagagggggacagagacccagagagagagggggacagagacccagagagagagggggacagagacccagagagagaggggaacagagacccacagagaggggggacagagacccagagagaggaggacagagacccagagagagaggggaacagagacccacagagagggggaacagagacccagagagaggaggacagagacccagagagagagggggacagagacccacagagagggggacagagacacagagagagagggacagagacccagagagagagggggacataggcccagagagaggggggacagaggcccagagagagggggacagagacccgggggatgacagaggcccagagagagagggggacagagacccagagagagagggggacagaggcccagagagagggagacagagacccggggagtgggggacagagacccagagagagaggggaacagaggcccagagagagggggacagagacccagagagaggacagagacctagagggaggagaagacccagggaaaagggagacagagacccagagagagaggaacagagatccacagacagagggggacagagacccagagagaggaaaggcaggcagggaagctgagaaatgtgttcaaatggggacacttcactgtacctgaggaccttgaactcccaaccctgttgtacccacttcctgtagaaggagccgctttcctcatctggacagtctggggtcccctgtctgcaaagcctgtcctaggttgctgtctcgcagggaaccacggatcctccgcagggtcaagccccccagctctggatgcttccagacctgcgtccagactcagctcccggcaggttgtacaggatgagctgcagggtgtgggcggtgagggctgccatatgcacccggagaactgcaagaccttgctcactgatattgacagaacccacactgagaagccggtctgggacgggatcactggggaatgatggggcatgatggaagcaattgaatgttgaattgggatgaatttattgacagagattccacactcaagcattggctataggggctgggagtgactctagttcgctctttggttgagtgaaatctgcatcccaaatcctttgcaaacgttggccaggtgcagcggctcacgcttgtaatcccagcactttgggaggctgaggcaggaggataacttaaggccaggaatttgagaccagcctgggcaacataacgagacaccatctctacaaaaattaaaatttcgggccaggcacggtggttcaagcctgtaatcccagcactttgtaaggc[134 bp omitted]gaggcatgagaatcgcttgaacccaggaggcaaaggttgcagtcagccgagatcgtgccactgcactccagcctggcgacacagcgagactccgtctatttaaaaaaaaaaaagaaagaaattcaactaccctggagcctgaggtgtgaggatcacctgagcctggaagattgatggtggctgtgccacagcactacagcctgcacgacacagtgagatctgtctctaaaaaataaaaaattagaccaggcatggtggcttacacctgtaatcccagcactttgggaggctgagtggggaggattgttcgagaccaggagtttgagaccagcctgggtaacatagcgagattcccgtctctacaaaaaatagaaaaattagccaggtgtaatcccagctactcgtggggctcaggtgggaggctcacttgagcccaggaggtcaaggctgcatgaggtattacggctccactgcaccccagaacaagcaggctacagagcaagactccacctaaaaaaaatttttttttcctctgttgtgtctatttcctctcatgctctttctaatagagccttcacttatgatttttttttcttttttttttttgagatggagtctcactctgtcgcccaggctggagtgcagtggcatgatttcggctcactgcaaccgccgcctcccaggatcaagcaattctcctgcctcagcctcccaggtagctgggactacaggcgcgcaccaccacacctggctaatttttgtatttttagtagtgacggggttttgcttattgaccaggttgttcttcaactcctggcctcaggtgatccgtccacctcagcctcccaaagtgctgggattacaagcgtgagccactgtgcttggccctggctagtttaacttttacttttgtacagacagggtctcactatgttggccaggctggtcttgaactcctgggctcaagccatcctcccacctcggcctcccacagtgctgggattataggtgtgagctactgcgcctgactctttgtcttaatttccctcttcctataaggacgccagtcacataggatttagcacacaccccaacccagtatgagctcacctgaacttgattccatctacaaagaccctatttcccaggaagatcacattcagaggttccaggtagacctgaagcttccaggacactattttccctcagtgcacagctctacataaatttggtcacactcttcttcttcttcttcttctttgcagacagagtttcactcttgttgcccaggctggggtgcaatgacacaatttcggttcaccgcaacctccgctgcccaggttcaagcgattctcctgcctcagcctccggagtggctgggattacaggcatgcaccaccaagcctggctaattttgtatttttagtagagatggggtttcaccatgttggtcaggctggtctcgaactcccgacctcaggagatccgcccgcctcggcctctcaaagttttgggattacaggtgtgaaccaccacggccagcctcacactcctcttcttttcctcacatttaagtgagctgtacccttaggagaaagttgcacagttagcactagggtgggccaggatagctttctgagccttaaaaatcttaaagtttggctgagaccagcctgacgaacatggagaaaccccgtctctactaaaaatacaaaagtagcttggtgtggtggtgcatgcctataatcccagctactcgggaggctggggcagtagaatcgcttgaacctgggaggcagaggttgtggtgagccaagattgcgccactgcactccagcctgggcaacaagaggtaaactccatctcacaaaattaaaaaaaaatttcttttaagtttggccaggcacggtggctcacgcctgtaatcccagcagtttgggaggctgaggcaggtgaatcccctgaggttaggagttcaagaccaatctggcccacatggtgaaacctgcctctactaaaattaaaaaaattagctgggtgcagtggtgtgcacctgaggtcccagctactcgggaggttgaggcacaggaatctcttgaacccaggaggcagaggctgtaggcagctgagatcgtgccactgcattccaacctgggcgacagagcaagactctgtctaaaaaaaaaaaagaaaagaaaaagaaaactctctgggcatggtggtgggcacctgaggtcccagctactcaggaggctgaggaaggagaatcgcttgaacccaggaggcggaggttgcagtgagccaagatcatgccactgcacttcagcctgggcgacagagcgagcccgtctctctctctgtctatatatatatatacacacacacacaataaataaataggttggctctttgctgtttccccacagtactgtattcaatatataaccactcagcacagccacctctccaatgttcaggagcaaactcttatctccttggttcttgcccccaccattatcagaaccttccctctgttttactctctgagcgcctgccaagatcagtttgggttttgtttctctattagttttcacccgtgtggagcttcgtccttccaagagggaggttctactgagtgagcacttcccagatccctggggagccaggctatttagcatctttcagcttctccaccgcaccctatcctcacctactcactggagcccctagagatttgactactgttcttgttttcttttctttttttgggggggtgggggagggggacagggtcactgtcgcccaggctggagtgcagtggcatgattttggctcactgcaacctctgcctcccaggttcaagcaattctcctgcctcagcctcctaagtagctgggattacaggtgcccccacctcgttaattttggggggtttttgttttgcttttttttgagagagaatctcgctctgttgcccgggctggagtgcagtgggctcactggaacctctgcctcccgggttcaagagattctcatgcttcagcctcccaagtagctgggacttcaggtttgcgccaccatgcccagctaatttttgcatttttagtagagacagggtttcgccatgttggccaggctgctctccaactcctgacctcaagtgaactgcctgccttggcctcccaaagtgctgggattacaagcgtgagccactgcacctggccctggctagttcttttaacttttactttggtacagacagggtcatgttggccaggctggtcttgaactcctgggctcaagcaatcctcccacctcggcctctcaaagtgctggggttataggtgtgagctaccacgcttggctctttgtcttaatttccctcttcctataaggacaccaatcatataggacttagcgcacaccccaacccggtataacctcacctgaacttgatttcatctacaaaggccgtatttccaagtaaggacacattcagcggtaccaggtagacatgaagcttccaggacgctatttccccaatgcacacctctacacggagttagtcacactcctcttcttcttctttttttttttttttttaagacagtttctctcttgttgcccaggctggagtgcaatggcatgatttcggctcactgcaacctctgcctctcgggttcaagcaattctcctgcctcagcctcccaagtagctgggattacaggcatgtgccaccacatctggctaattttgtatttttagtagagacagggtttctccatgttggtcaggctggtctcgaactcctgacctcaggtgatacgcctgccttggcctcccacagtgctgggattacaggcgtaagccaccgcacctggcctcacactcctcttctttttctctcatttaagtgagccgtacccttaggaggaagttgcacagttgacattagggtggg[137 bp omitted]aaggtgaaaccctgtctctactaaaattacaaacattagctgggcgtggtggtgcacacctgcggtcccagttacttgggaggttg[136 bp omitted]ctgcctcagcct[131 bp omitted]tcggcctcccaaagtgctgaggcacaggaatctcttgaacccaggaggcagaggctgcagtgagctgagatcacgccactgcactccaacctgggcaacagagcaagactccatctcaaaacaaaacaaaaaaactatctgggcatggtggtgggcacctgtaatcccagctactcgggaggctgaggcaggagaatcgcttgaacccaggaggcggaggttgcagtgagccaagatcacaccactgcactccagcctgggtgacagagcgagcccctgtctcaaaaaattaaatatataaataacaaataaataaataggctgactctttgctgtttccccacagtattgtatgcaatatataaccactcagcacagccacctctccaacgttcaggagcaaactctatctccttggttcttgcccccaccattatcagaaccttccctctgctttactctctgagcgcctgccaagatcagtttgggttttgtttctctattagttttcaccagtgtggagcttcgtccttccaagagggaggttctactgagtgagcacttcccagatccctggggagccaggctatttagcatctttcagcttctccaccacaccctatcctcacctactcactggagcccctagagatttgactactgttcttgttttcttttctttttttttcggaggggtggagggggacagggtcactgtcgcccaggctggagtgcagtggcacaatctcagctctctgcaacctctgcctcccaggttcaagcaattctcctgcctcagcctcctaagtggctcagattacaggtgcctccacctggctaattttttggaggttttttgtttttgtttttgttttttttgttttttttttttgtttttttttgagagaaagaatctcgctctgttgcccgggctggagtgcagtgggctcactggaacctccgcctcccgggttcaagagattctcgtgcttcagcctcccaagtagctgggacttcaggtttgcgctaccatgcccggctaatttttgtatttttagtagagacagggtttcaccatgttggccaggcggctctcagaactcctgacctcaagtgatctgcccgcctcggccacccaaagtgttggattacaagcgtaagccattgcacctggccgaaaaccaatctgtatcataaccccacggcacctgaatcatttctaagtgtacagttaagtcgcgttaagtatattcacattgttgcacaaccaatcttcagaattttttcatctgataaaattgaaactctctgccgcaattaaatcccacttccccaattctcctcccttcagctcctggccactttttccagccccatttgttgaaaacatggtggtgagctccttgaatgactgagaagcttttgtacatggacaggaaaattcacaacaatttgtttttttgttaatgatcaatgaatttttaaacaattatctttcctttaaacattcacagactacttctacagctaaaaataacaagccacaaatttcacaattgtagatttcgcctaaatatttgaacagtgattgcacatttaatcagtgaacttttcacaaatctgatattgtggtttcccttaaatgccatgaataggagaaaaacagtaatacactctgtcatacttttcacaagtctgatataccagattcttacaaatgctttaaatattttcgagaaggctgggcaaggtggcttacacctgtaatctcagcactttgagaggccaaggtagaaggatcacctgagcccaggagttctaaaccagactgggcaacatagcaaaagcccatctctaccaaaaaaaaaaaaaaaaaaattagccaagtgtggtgaagcgcacctgtagtcccagctagttaagaggctgaggtgggaggatcacttgagctggggaggtcaaggctacagtgagctgtgatcacaccactgcactccaacctgggtga[136 bp omitted]aaaaattagccgaaagtagcccagtatggtggcgcatgcctgtaatcccagctaattaagtggctgaggcaggagaatcacttgaacctgggaggcggaggttgcagtgagctgagatcacgctattgcactccagcctgggcgacaaaagcgaaactccgtctcaaaaaataccctcccagagagctcccttaccctttcaccaagtggaaacacagcaagaaggtgccagcaatgaacaaggaaactggcccacaccagacacagaatatgctgctgccttgatgttggactccacaccctccagaactatgagagatacatatttgttccttaagctacacagtctgtggtatttttgttacaacagcctgaatgccctcttccaagtcaattctcaccaagccgacattccagggcaaagcccgtgttatcttagagtttgtcgtaaccacatgaattgggttatttatttatttatttatttatgagacgcagttttgctcgtcacccaggctggagtgcaatggcaagatctcggttcactgcaacctcctcctcctagattcaaatgattctcccgcctc[134 bp omitted]ctcggcgtcccaaagtgttgggatttcaggcgtgagccaccgcgcccagtcgactcagagtgtcttatttttataatacagcctgaaaaacttgttctaagtcatagtattgtaataggttgggacatgagatgatttcacggctgtttgttccaggaccttctccgggaaacgtgtggggcatttcctctttgttacacactcagggtgagcccatttttcctctacttgtttgggtgaagcttcgccgctgtctctgccacaaagctgaccctccagctctgtgacccccttggcagctggcaccagcagcacggggccctggcagggcgctggctggcaggaggaggggtgtagggatttctcacaagaccctagttccacactgcgtcttgccaggagccagggacagcaatggctccagcttcctgttactttctgctcttccggaagtagatttccaggcccctcagagagaggtcccagactccattaggccacaccctcttggaggtgagagacccgctgcctgcagcccactccctagaggtctatttggtttgcatagtcgccgttttttcataataaaacttaaaaaaaaaaaaaagaccaattaaaacctgtaaaacaggtggcaggtgatcaggattagaatgctttgaaatcttttgttattctggaatatgacagaatgattatatttagatttggtcactttaaggatgcatgttaaaatttcaagagtgggccaggcgctgtggcacacccttgtgatccgagcactttgggagaccgaggcaggaggatcgattccttgagcccaggagttcgagaccagcctgggtaacatggtgaaacaccgtctctaaaaaaacatacaaaaatgtgccgggcatggtggcacacacctacagtcccagctacttgggaggctgaagtgggtgggtcgcctgaattcaggagtttgaggctgcagtgagctatgattgcaccattgcactccagcctaggtgacagagcaagaccctgtctctaaaaataaataaataaattttcttaacttggaaacagtcacaaacatttaaaaatttggaagtacagtacaagcaattcttattttccagaaccatttgaaagtcacatgtgcccttgaaaccccatcactacattaacacatactccagtgtgtactttctgcaaacaaggacattctcctacacaaccacagcagggccgccaaaatcaggaaagtagccttgacccacgactactctggaatcatcagacctccttcatgtttgccacatgtcccagtgatgctttttatggcaaaagaatgcagttcagagccgggagcggtggctcacgcctgtaatcccaacactttgggaggccaaggcgggcggatcacctgaagtcaggagttcgagaccactctggccaacatggcaaaaccccgtctctactaaaaatgcaaaaattaccaaaaatggatgcctgtaaccccagctactcggaaggctgaggcaggagaatcacttgaaccctggaggaggaggttgcagtgagccgagatcgtgccactgcactccagcccagatgacaagagtgaaactctgtctcaaaaataataataataataataataataaaatagccgggcgtggtggcgggcatctgtaatcccagctactcaggaggctgaggcaggagaatctcttgaacccgggaggtggaggttgtagtgagccatgattgcaccaccgcactccagcctgggcaacaaagcgagactctgctctccccactgccaaaaaaagaatgcagttcagggtcatgcactgcttctgagggcaggtctctttgaaagtcaggaaggacagttcctcagtcttccctggtgttcatgaccttggcatttggaacattacaggccggttatcgagtcgtctctccctccatgtggatttatttgatgtttcctcgtgatcggattctttggcagcacaacgactgagatcatgttgtgtgtttctcactggaagtcaggtcactcgcggcgtccacctctccagtttctgatgacatttgcttcagtcacatgatgcaagtggcatcagccggacttgtccttgccaagcaatgagagctttgaaactatactaatatcacattcctcaggaaatcttcaggattttttgttttctttttttttttttttttttttttcagacagagtctcactctgtcgcccaggcttgagtgcaatggcgcgatcttggctcactgcaacctctgcctcccgggttcaagcaattctcctgcctcagccttctgagtagctgggattacaggtacatgccaccacagccagctaatttttgtatttttagtaaagatggggtttcaccatgttggtcaggctggtctcgaactcctgacctcatgatccacccgccttggcctctcaaagtgctgagattacaggcgtgacccactgcgcctgggccattttttttgttttttttgagatggagtcttgctgtgtcgcccgggctggagtgcagtgctacaatttggctcactacttcagtctcccagcctcaagcgactcccacctcagcctcccaagtagctaggaccacaggcacacgctatgacacccagctaattgtttgtctttttggtagagacggggtttc[131 bp omitted]tagagacagggtcttgctctattgcccaggctggaatgcagtgatgcaatcacagctcactgcagccttgacctcactggactcagtgatcctcccacctcagcctcctgagtagctgggaacagaatgccatcactgcaggatgccatgcctggcccttccagttattaatggatttatttatgtctgtgtggactcatggtttcctattttattccatgagttataatcagttatatcattctctatttttggtgttcaaactcatttattttgatgctctttttatttacttttttttctttcaagacagagtctccatctgtcacccagcctagagtgcagtggcgcgatctcggctcactgcaacctccacctcctgggttcaagtgattctcctgcctcagcctcctgagtagctgggactacaggcgtgcaccaccacactcggctaatttttttgtatttttagtagagacgaggtttcaccatgttggtcaggctggtctcaaatccctgacctcgtgatctgcctgcctcagcctcccaaagtgctgggattataggcgtgagccaccgtacccggctctttatttactttttggggtactctgtatttagtcctctattttcccaatgggagccccctcaagctggtggctatgtgctttgtttgtttgtttgtttttgagacagggtcttgctctgtcacccaggctggagtgcagtgatgtgattcggctcactgctacctccgcctcccaggctcaagccttcctcccacttca[134 bp omitted]cagcctcgcaaagtgctgggattgcagatgtgagccaccgcgcccagcctgtttgtttgttttaatcagctctcaagggcttggaaaccatgcgtttttgacaggcctccattagtcacacttgagtcgttcctgatttctggtacagcaaaatgttctaggctcattttttttctttctctaaaccagctctagaatcagctgtttctccaaggagccctggttccttttagaatgggaagccaagatccaaacactaacagggctcgttgcttttgtttttgaattttgtctgctaatggatcctctcaggggacggattacatatacacacacacacacacacacacacacacacacacacacacacaccacgcacatatgtggggccaggcacagtggctcacacctgtaatctcagcactttgggaggctgaggcaggaggactgcttgagcccaagagtttgagaccagcctacgcaacatagtgaggcccagtctctactaataatttaaaaattagccaggcgtggtggtgcacacctgtggtcccagctactcagaaggctgaggatggaggatcgcttgagcccatgaggcagagtctgcagtgacgcatgatcgtgccactgcattccagcctgagcaacagagagacactccatctcaacgaacaaatatatacatgtatgtgtgtagtatattgtatatatcacattgtacctcatatattacattatatactacagatatcacattgtatattatatatccaccatgtaatatgtctattatatctattttgtgcatgttatgtatatatgtgtatatatatctacataggaggtatgtatacatagacacacatatattaggtatgtatacatttgtatatttccatatctatttctgcatattgagaacgacacatccaattcaaatccaatatctggccaggcatggtggctgatgcctgtaataccaacactttggaaggccgaggtgggtggatcacttgaggtcaggagtttgagaccagcctggccaacatagcaaaaccccatctctaccaaaaatacaaaaattagctgagtgtgatggcaggcgcccacaatcccagctactcaggaggctgaggtggaagaatcacttgaacctgggaggcagaggctgcagtgagccaagatggtgccactgtacttcagcctgggagacagagtgagactccatctcaaaaaaaaaaaaaaaaagaaatccaacacctagactgggtgccgtggctcatgcctataatcccagcactttgggaggccaaggcgggcagatcactagaggtcaggagtttgagaccaacctggccgatatggtgaaacgctgtctccactaaaaatacaaaaattagctgggtgtggtgctggaggcctctaatcctagctactcgggtggctgaggcaggagaatcgcttgaatccaggaggtggaggttgcagtgagccaagattatgccacttcactccagcctggacaacagagtgagactctgtctcaaaaaaataaataaataaagacaaattcaatacctctagttctctccctttccatatttatatctgccttttctgacagtgagaaatatgacttcattttcttaatttccttatcggtcaattctcctctatgttagccatctctcatctccacagctgtcccctccttccacctcccctgtgccctctgcacccagcttgggctgacttcccgagctacagccccccatcctattagcctaggggacttacgtttcctacttgggtgccccccactgtgctgagctgctcacatcagtaaatgcctccttcaccccactaaggccctgacaccccacttctgggccactgtgcccccaacaccccaagctggccttgcctgccccacctcaaaccttagaactttatcgttcaggaagacaaatttagggaaggggaagaatgccgatttctatttaatgtatttgaccatatcaatgttttcttttctggcctctgaagtttgagtcacggtcatgcccatgttataaaataattttccaatgcttacttctcactcgttatggtttcctatctgatactgaagactttgatccatctggagtttattcagtgggttatttttatttttttattccttccttcacttggattgaatgggttttctgtattcccgctttttcatatttacttttttaatcaaagttatatatgtacacagtaaagtcacacagtgctacgtgttcagtttaaccttccccatgctgtcccattggtaactgatctctgaattagttatagcaatgtgaaacactgggacggacccacactaaaatatcagtggtttgaacaattgtttttttttttttttttttgagacggagtctcactctttcatccgggctggaatgcagtggtgcgatcactacaacctctgcctcccgggttcaagcgattctcctgcctcagtctccggggtaggtgggattacaggcacctgccactatgcccagctaattttttgtatttttagtagacacagggtttcaccatgttggccaggctggtctggaactcctgatctcgtgatttgccggcctcggcctcccaaagtgctgagtggccgtgagccaccgtgcctggcctaattgattttttttttttttttttttacagagagatggggtctcactatgttgcccagtagtctcaaactcctgggttcaagcaaccctcttgccttggcctcccaaagcactgggattacaggtgtgagccactgcacctggccctacagttgatttttgtttctattcatgtaaagtctaactagtagaaagacagagggtcaaggactcaggctgatagcagctctgtcattttcttttttttttcttcttcttcttctattttttttggtgagatggagatttactcttgttgcccaggctggagtgcaatggcgcgatctcggctcaccgcatcctccgcctcccgggttcaagcgattctcctgcctc[221 bp omitted]ggatgtgggacgcaggctcccaggtgaaccgcaatgatccccacctcttggtatctatgccatgtgcattcctttcccacattacactagggttggcctttgtgatggatatcacagggcagaagtggtgggatgggccaggcagtcgctcacacctgtaatcccagcactttaggaggctgaggcaggaggatcacttgagcccaagaggtcaagaccagcctgaggcccccatctctacaaaaaatttaaaaattaggccgggcgcagtggctcatgcctgtaatcccagcactctgggaggcagaggtgggcggatcacctgaggtcgggagttcgagaccagcctgaccaacatggagaaactctgtctctactaaaaaaatacaaaattagccgggcgtagtgggatgtaatcccagctacttgggaggctgaggcaggagaatcgcttaaacccgggaggtggaggttgtggtgagttgagatcgcaccattgcactccagcctgggcaataagagcaaaactccgtctcaaaaaattaaaaaaaaattttaattggctgggtgtggtggcgtgtgcccatggtcccagctacttggcaggctgaggcaggagtatcacttgagcctaggaagttgaggctccagtgagccatgaccgcaccactgcactccagccttgatgacagagggggaccctgtctcaagaaaaaaaaaaaaaaggaatggtgggatatgacatctgagactaggctacaaagactgcggcttccatcgtggtctctctctcactctctctttcatcacttgctctgggagaagctagtggccaagacacgaggaatgcccaagcagcccatgcagacatcaacagccagcgaggaactaaggcctccagccaacagccctgtgagtgagctcggataggccaggctcagtggctcacacctgtaataccagcattttgggaggccaaagcaagtggataacttgaagccaggtgttcgagaaccagcctggccaacatggtgaaatcccgtctctacttaaaaatacaaaaaattagctgggtgtggtggcacgtgcctgtaatcccagctactcgggaggctgacgcaggagaatcacttaaacctgggaggcaaaggtttcagtgagtggagactgtgccactgcactccagcctgggcaacagagtgagactctgagactctgtctcgagagaaaaaaaaaaagagggttctccagcctctgtcgagccttcacatgactgcagtcctggctgacaagcttgactgaaacctgaaccaggaacacccagccgagctgcttgggattcctgaccctccagaaactatgtgagaaggccaggcaccatggctgacacctgtaatcccagaactttgggaggccgaggcaggcagaccacttgaggtcag[141 bp omitted]gcagtgggtgcctgtggtcccagctacttgggaggctgaggcaggaaaatggcgtgaacccaggagacagagcttgcagtgagcagagatcatgccactgcactccagcctggtgacagagcgagactccgtctcaaaaaaaaaaaaaaaattagccaggtgtggtggtaggtgcctgtaatcccagctactaaaaaaaaaagagagagagagaagggaaaaaaaaaactatgtgatacaataaatatttgttgtttaagctgtgaggaattaactcaggggtaatttgttagacagcaatagatgactactacactgctatctgcatccaaccggcaggtagagaaaagagagagggcacattagaagttccctaatgggtgtggctggaagtgaggcagggctcttctcattggccagaaccactcacataaccccagtgacttgcaaggggtgctgggagatataatccccccaggggcactgtcacacaataacaaatatatatttggtctctgtccccccagtttctgggacagagctttgaaaccccttataatttccccagtgttagggatgccagcagcatcttttgttctaatatttgatctttgaccccagttcccgacaaagggctcctaaatcccttggaatttcctgagtaatgggagcatcattttttcttttttctttttattttcttcttcccttttttttttttttttttttttttttttttgtttgagacagcgtcttgctctgtcaccaggctggagtgcagtggtgcaatctccacacactgcaacctctgcctcctgggttcaagcaagtctcctgcttcagcctcccaagtagctgggactacaggtgcccgccaccatgcctggctaatttttgtatttttagtagagacgggggtttcacca[138 bp omitted]tcctgatgggggctgatcaccagcaagactcagtcaatattagaagcatggaacctgtagccccatcccactccacatctttccggaagaagagggaactggagctggaattactaatctatcctacttatgcgctgaagtctccataaaagtccctaaagtatgggggtgggagaggttccttgtagcgtccagccctacagggccttgtgggttttctcttcgtgtgtggagatgagagattgtagaaagaaagacatgaaactaagagagagtatgaaagacagctgggcccagggggccactaccaccagtgcatggagtccattagtggcctcgaatgcctggactgctgctatttattgtatacaaggcaagggggcagggtaaggagtgtgagtcatctcaaatgattaataaggtcaagcaagtcacgtgtccatgtgacagggggcctttccctttttggtagacgaagcagagagggaagacagcatacggtcagcattttttctatgtacttatcagagagatcaaagactttaatattttcactatttctgctactgctatctcccaggaacttaaaagaggaaccaggtgtacaggcggaacatgaaagtggacaaggatcatgaccactgaagcacagtaccacagggagatgtttaagcctccggatgactgtgggcaggcctggctaatgtccggcctcccacaagaggctggtgaggcagagtgttctctaactcccccaaggaaggggaaactccctttcccggtctgctaagtaacgggtgccttcccaggcactggtgctaccactagaccaaggcgtccttaagcccttatctgggcgtggcggaggactttcactcttgtcttctggtcacatctcaccatgtcccttcagctcctgactctgtatcgcctggtttttcctcagttataataataaaacagagattaatactaaaactaataattgataatatccatatataatcatctctatatcctattgctagtataacttttcttattctaagtattttctttattatattgaaacagtatgtgccttcaatctcttgcctcagcacctgggtggctctctgcccacagttccgggcggggaagcaccccaactccatggagacgcccaacctggaagctcccccaaacccatcctttgctcccgtgctcgggaggcgttcagatgttgccctttgcacctctttatctgacaggttttatttaattatatgataaactgataaatgtgttttccttagttctgtgaggcattgtagcaaatttctgagcctaaggagggagtcatgggaacccccattactagcaagtcagaagctcgggtgagaccacgtggacttgtgattggcatctcccaaggggcagcctcgtgggactgagcctttcacctgtgggatccgatgctatctccaggtagataatgtcagagttggattgaattgtgggacacccagcttgggtaggagaatttgtcagcgtgggaaaaaccccacacacctggtcacagaagtgttgagtgtgagcctgagaaaaacaggtgtttttttctagataagatccatggaaggggaacacaatttttttttttttttgagacagctctctgtcgcctaggctggagtgcagtggcgcgatctcgactcactgcaagctccgcctctcgggttcacgccattctcctgccccagcctccctcctcccgagtagcggggactacaggcgcccaccaccacgcccggctaattttttgtatttttagtagagacggg[148 bp omitted]ttgctaaatttggtttcacggggaacacatttcctggcccctgggatttgggtgtgtatcctggtctgtgacgcaggccaggggctggcatgtgacgcgaaccgggggccacttcccgaagcaggtcagcgagaggcactctggagctgttgcccagccactagtgacgtcatgggctttcagtcattcctattgggtgctcttagtgctctatcctcaaactccgcaaccggcccttggaaaagactctgaactgaggcttctggaaaaaagaatccgagcttccacgtcatttcagaaatacccccctcaccttatttatttatttatttatttatttatttatttatttatttatttatttatttattgaaacaaggtctgactctgtcgcccaggatggagggcagtggcgcgatctctgctcactgcaacctggaactcctggactcaagcgatcccccacctcagcctcccgagtatctgggattacaggtactcgctaccacgctcagctaatttttaaattttttgtagaaatggggttttgccatgttgcccaggctggtctcgagcttctgagctcaagcgatctgcccgcctcgttctcccaaagggctaggattacaggcgtgagccaccgcgcctggcccccaaattcttttatgtttataaatttaaactgtacgccgggcgtggtggctcacgcctgtaatcctagcactttgggagtccaaggcaggtggatcacctgaggtcaggagttcaagaccagctgaccaacatggtgaaaccctgtctctactaaaaaatacaaaaaattagctgggcgtggtggcacacgcctggaatcccagctactcgggaggctgaggcag[136 bp omitted]cgtcatcatcagccaagggaaaacgtggatggggcagagtccaggagacaccaggcgtgagctttcagatgtcctcccccagtggagttctagacagtgctcaattctcccggtaatgacgtgtgccaaaacgcatgcagtattgccaaccagggagtctcaccccagatcttaggatgaaaaaaaaattttttttttttttttgagtcttgctttgtcacccaggctgaaatgcagtgtcatgatttcggctcactgcagactcaacctcccaggttcaagctattctcatgcctcacgagtagctgggattacaagggtacgccatcacacctggctaattttttaatttttatttatttatgtatttatttatttttgagacgaagtcttactctgtcacccaggctggagtgcagcggcgtgatctcggctcattgcagcttccgcctcctgggttcaagtgattctcctgctccagcctcccaagtagctgcaactacaggcgcccgccactctgcctggctaatttttggtttttgttttttgttttttttgagacggagtctcgccctgttgcccaggctggagagcaatggcgcagtctcggctcactgcaacctctgcctcctgggttcaagcgattctcctgcctcagcctcctgggtagctgggattataggcacctgccaccatgccgggctactttttgtatttttagtagagatggggtttcatgatgttggccaggctgttctcaaactcttggaccttgtgatccgcctgcctcggcctcccaaagttctaggattacaggcgtgagccaccaccatgctgggcctaatttttgtatttttagtagagacggggttttgccatgttgcccaggctagtcccgaactcctgggctcaaggaatctgcccgcctcggcctctcaaagtgctgggattacattcgtgaggcaccgtgcgcagtccgggggacaaaattttaaacaagtgttggtcatgtaagcatggcagactgcacgtgtgactgacctcagatactccagctgcctcctcctgaggggtggactagaacagggactggtaaccaggggttaaaggatcgggacctgacgcctaaatcttttgaatttacatgcaaaatatgggcatataacatgagcagtggttcaggatgtgggcaatgaagagagagagcctgagttcccccacctcttactactggagtaaccaggggcaggagacttctgaatttcagtattcttatctgcacaagtggaaacgagagaaatactgtagggcagtgccttctagcgggcttagaggaagcctctggacatggtagctattacttatttgcttagtctttagcattctgcacgttttgtttgtttgtttgagatggagtctctctctgtcacccaggctagagtgcagtggtgcgatctcagctcactgctacgtccacctcccgggttcaagtgattctcatg[131 bp omitted]cctcagcctcccaaagtgctgggatttacagttgtgagccaccccgcccagccagatgttcaaattttgatatggattaaattcagttactagatcactttttttttttttttttgagacaggcccttactgtgttgcccaggctggagtgtggtggcacgaccccatggctcactgcaacctcgacctcgtgctcaagcaatcctcccacctcagccttctcagtagttgggactgcaggcaggtgccaccatacccagctaagtttttgttgttgttgttgtagagaccaggtgcatgctgttaaaactaactacccgagactgggtaatttataaagaaaagaggtttaattgactcacagttccacagggctggggagtcctcaggagacttacaatcatagcaaaaggggaaggggaagcaaggcacgtcttatatagtggcaggagggagaaagagctagaggagggaaccaccacagtttcaaaccatcagatcttgtgcgaactcactcatgactacgagaacagcatgggggaaactgcccccacgatccagttacctcccaccatgtccctccctggacccgctgagattataattcataatgagatttcagtggggacacagagccaaaccatatcagttgccaaggctgatcttaaactcctgggctccagcaatcctcctgcctcagcctcccaaaatgctgggattataggcatgagctaccgtgcccagctgcatcgtcatcttaatactattgtcttccagtctataaacttgggatgtctttccatttatgtctgttacgaatttctttctttcttttgtgtattgtcagtctttcaccattgagtaggatgtttgctgtgggtttttcataaatgcctaagccagtgtttctgttttgttttgttttcttcttttttgagatggagtctaactcaggctggagtgcagtggtgtcatcttggctcactgcaaactctgcctcctgggatcaagcgaatctctcgcctcagcctctcaaatagctgggattacagacacctgccaccaagcctggctaatttttgtgtttttagtggaggcagggtttccccatgttggccaggccggactcgaacccctgacctcaagtgatctgtctgcctcggtctcccaaaaagctgggaatacacatgtgagccaccgcgccctgcctaagccagtgtttctatttttttttttttttttttttttgagatggagtctcactctgtcgcccaggctggagtgcaatggcacaatctcggctcactgcaacctgtgcctccggggttcaagtgattctcctgcctcagcctcctgagtacctgggattactgcccaccaccacactgggccaatttttgtatttttagtaga[132 bp omitted]tcaggggagtctttccaaacactcatcccttgagatgtttgtaaacttgtataatgccctaaaaatggttttaaccactcacacatttgtt[156 bp omitted]taataaaaatacaaaaaaaaattagccaggcgtggtggcaggtgcctgtagtcccagctacttgggaggctaaggcaggagaatggcgtgaacctgggaggcggagcttgcagtgagccgagatcgtgccactgcactccagcctgggcaacggagtgagactccgcctcaaaaaaaaaaaaaaaagacatagcacttgaacattaatttcctcagcaaggccatttttatttttatttttattttttgagatggagtttcgatcttgttgcccaggctggagtgcaatggcacaatctcagctcactgcaccctcggcttccgaggttcaagcaattctcctgtctcagcctcccgagtagctgggattacaggcatgcaccaccacgcccggctaatattgtatttttagtagagacggggtttctccatgttggtcaggctggtctcaaactcctgacctcaggtgatccgcccgccttgacctcccaaagtgctgggattacaggcatgagccactgagcccggccagcaaggccatttttactttctgcagaaaaggtacactcgccagcagttttgccacaagagtacaacgaacaaaggagacagggtcatttataacctgacgcatccactctactgccgtgtcgggtttccattggctggaacgggacctcacattctgtatttgtcccaactggctagcaacttggaactttttaaaagaggcaaaggcagaggagaacaaaggaagggggaagtgacttgtggaatgctgagaaaggtaaaaacaccttcaaataaggaagaggaacaggctgtgacctaatgcttgcttggaccagtataagcatgccagggcaaatatttagggtaaattgtgggagctaaaaacataaagtacactgatttctttattacggctagcagatatttaagaatgttagcacaggtctttgaatacattttgcgtctaagagaagttactatttattcctaagtagacgaggaggaaagtctctttgaagaggaagctctactttaatttttacacattgctaactgatgaaattgtatttggagactcactctgtaaattgcctctttccttagttttccattttttatttttagtttacttatttatttattttgagacacagtgtcactctgtcacccaggctggagtgcagtggctcaatcttagctcattgcaaactctgcctcccgggttcaagggattctcctgccaggctggcttcactatgttggccaggctggtctcaaactccagacctcaagtgatcttcccgcctcggcctcggaaagtgctgggatcacaggtgtgagccactgcgcccggccttctcctcttttggcctttgactttatactcaacactgaccaccagatggtgctgcaggcacaccacagcgtggcctgacacacagcacgctgtggctgggttattacagctgagatgtatttacctggatttattattttatttatttatttatttttcagtaggaaaggtagggcccgctatttaccaggtttttttttaagtgacagagaaagactgtcttaagcacacacacacacacacacacacacacacacacacacacacacacagagcttataaaacagtttaacggccgggcgcagtggctcatggcttaatcccagcattttaggaggctg[134 bp omitted]gaagcaggagaattgcttgaacctgggaggcggaggttgcagtgagccgagatcacgccattgcactctagcctgggcggcagagcgagactccatctcaaaaaaaaaaaaaaaaaaaaacagttaaaaaaaaaaaacagtttttaggccccattatgcctgtgtgattctttgtgtcctaatcttgggcgcacacacacacacacacacacacttatttatttttcttgagacagagtattgttctgttgcctaggctggagtgcagcgttgtgatctcagctcactgcagcctccacctcccaggttcaagtgattctcctgcctcagcctccagagtagctgagattacaggtgcccgccaccacacccggctaatttttctatttttagtagagacaggggtctcgccatgttcaccaggctggtctcaaactcctggcctcaggtgatccacccacctcggcctcccaaaatgctgggattactggcgtgagccacggcgcctagtcctgtttgttattttaaaatgaagacatccttaagcatgaaaatgtctttaaatattttgaaaaatgttttctaaagccatgaaggcctatagtaccctaagtcttatataattaaattataattaaagatttaatctggctgggcctggtggctcacacctgtaatcccagcactttaagaggc[216 bp omitted]agagcgagactccatctcaaaaaaaaaaaaaaaattattctttgcagatattcattttctcacagaattggactcttttttttctttttctttctttctttctttcttttttttttttttttttgagacagggtcttgctctgttacccaggctggagtgcagcggcatgaacacagctcactgcaacctggaattcttggcctaaacccatcctcctatctcagcctaccgaatagctgggaccataggcacacgccaccacatgcagctaatttttttattttttgtagaggagggggggtctcactatgttgcccagggtggtctcgaactcctgggctcaagtaatcctcctgccttggcctcccagaatgctgggattacaggcatgaggcaccaacacaaagttattttccaaagtgagctgcagcgccaacactcacacctactcactgtgtgcccagcactgctcatggatagcagttcttgaaccctttggtcccaagaccccttcacattctcaaaaatcactgaggctgagcacggtggctcacgcctgtaatcccagcacgttgggaggctgaggcgggcggatcacctgaggtcaggagttccagaccagcctggccaacatggtgaaaccccatctctactaaaaataccaaaaaaaaggccgggcgcggtgactcacgcctgtaatcccagcacgtcgggaggccgaggcgggtggatcacaaggtcaggagatcgagaccatcctggctaacacggtgaaaccccgtctctactaagaatacaaaaaatttagctgggcgtggtggcgggcgcctgtagtcccaggtactcgggaggctgaggcaggaagaatggcgtgaaccctggaggcggagcttgcagtgagccgagatggcgccactgcactgcagcctgggtgacagagtgagactgcatctcaaaaaaaaaaaaaaaaagaaattagccgggcttggtggcgggcacctgtaatcccagctactcgagaggctgaggcaaaagaatcgcttgaacccaggaggcagagattgcagtgagctaagattgcgccactgcactctggcctgggtgacagactgagactccatctcaaaaatcatcatcatcatcataataaattgatggccaggcacggtggctcacgcctataatcccagcactttgggaggccgaggcaggtggatcgtgaggtcaagcgatagagaccatcctggccaacatggtaaaaccccttctctactaaaataacaaaaaaaaaaaaattagctgagtgtgatgacacacaactgtagtcctagctactcgggaggctgagacaggacaattgcttgaacccaggaggcagaggttgcagtgagccaagatcatgcctctgcactccagcttggtgacagagcaagactcggtcttaataataataataataattgattacattgtacctgctctagaaaagaaaaaagaaaaaaaaatcattgatgatagtctcttaggctgggggtggtggctcgtgcctgtaacctcaacactgggagaccaaggtggaaggatcgtttgagatcagcctagtgggaccttgtctctacaaaaaataaaaaataataaaattaggctcagtgcagtggctcatgactgtaatcccagcactttgggaggataagatgggcggatcacttgagcgtaggagtttgagaccagcctgggcattatattgagaccttgtctctacaaaaataaaaataaaaaattaggcaggcatagtggcacatgcctgtgattccagctgcttgggaggctgaggtgagagaattgtttgagtctgggaggtcgaggctgcagtgattactgcagtacactgaatgcgtcactgtactccagcctatagatatacatgtgtgtatatatatatgtaggggtgacgcttgtgaattcttttttaattttattatttttattttctttttgagatagagtcttgctctgtcacactggctggagtgcagtggcacgatctcatctcattacaacctctgcctcctgggttcaagtggttctcctgcctcagccttccaagtagctgggattacaggcatgcgccatgatgcctggcgattttctgtatttttatttcatttatgtatttatttagagatggagttttgctcttgttgcccaggctggagtgcaatggcgtgatctcggctcactgcaacctctgcctcccggattcaaacaattctcctgtcttagactcccgagtagctgggattacaggcatgcgccaccacgcccggataatttttgtatttttagtagaga[134 bp omitted]tggccaagctggtctggaacccctgacctcaggtgacgagcctgccttggcctcccaaagtgctaggattacaggcatgagccaccaagcccagccttaattttattttaagttctggggtacatgtgcaggacatgcaggtttgttacatgggtaaacgtgtgccatggtggtttgctgcacctgttaacccatcacctggtattaagccccgcatccattagctatttatcctgatgctttccctccccaccaccctgcaacaggccccagtgtatgttgttcccctccccgtgtccttgtgttctcattgttcagctcccacttataaatgagaacatgcggtgtttggttggttttctttttttctttttttttttttttagatggagtctcgctctgtcacccaggctggagtgcagtggcacgatctcggctcactgcaagctccacctctcaggttcacaccattctcctgcctcagcctcccgagtagctgggactacaggcgcccaccaccatgcccggttaatttttttttttgtatttttagtagagacagggtttcaccatggtagccaggatggtcttgatctcctgacctcgtgatccacctgcctcagcctcccaaagtgctgggagtacaggtgtgagccaccgcgcccggcttctttatttttttgagagagggtctcactctgtcacccaggctggagtgtagtggtgtgatcttggctcactgcaacctccatttcccagattcaagcaattcttgtgcctcagcctcccgagtaactgagagtacaggtgtgtgccaccatgcctggctcattttcatatttttagtagaaatggggtttcaccatgttggccaggctggtctcgaactccagacctcaagtgatctgcccacctcggcctccgaaagtgctgggattataggcgtgagccactgtgctcagaccggtgtttggttttctgttcctgtgttagtttgctgaggacaaaaaaatatggaatgctttgcgaatttgtgtgtcatcctcgcacaggggccatcctagtcttctctgtatcattccaattttagtatatgtgctgccgaagtgagcacatggattgttttatcaagggaagaaagcttcccagaggcctccaggcaagtttcccttaggatccccttggcctctaacctttccttgagggatcattgacaatgggaaatgagaggatgtggtaatgggtctgctgacgccgtaaaaaactggactttcagtgtcaacgccgatggctgctggataggccacagatcatgtttgccagaatagtcccacagggtgtccctccagcaaattggatcaaggagattaagcaccacacctgaggtcacacagccagccgataaccaaggcagtctgtgaattcgaatctgcaagaggatgtgcctcgtccatccgaatgcctggctttctctacacctccacataacaattataatatgaaaaggtatatgtgggccaggttgggtagctcatgcctatcatcccagcatgttgagaggccgaggcaggtggatcacctgaggtcagcagtttgagaccagcctggccaacatggcaaaactcccatctttactaaaaatacaaaaattagctgggcatggtagtgcacgcctgtagtcccagctactggggaggctgaggcaggacaatcgcttgaacccaggaggcagaggttgcagtgagtcgagatcatgccactgcactccagcctgagcgacagagcgagactctgtctcaagaaaaaaataaaataaagtgtgtgtgtgtgtctgtgtgtgtgtgtgtgtgtgtgtgtgtgtgttggagtgcagtggcatgatctctgctcactgcaacctctgcctcctaggttcaagcgattctcctgcctcagcctctcaagtagatgggattacaggcaccctccaccacgtccagctggtttttttgtatttttagtagagatggggtttcaccatgttggccaggctgctcttgaactcctgacttcaggtgatccgcccaccttggcctcccaaagtgctgggattacgggcatgagccacagtgcctggcctttttttcaagacagtcttgctctgtcacccaggctggagtgtagtggcacaatcacagctcactgcagcctcaacctcccgggctcaggcaatcctcccacctcagcctctggagtagctgggactatactcacatgccacctcacctggttaattttctgtattttctgtacagatgggatctcactgtgttgcccagcctggtctcaagcaatcctcccgcctcagcctcccacagtgctggaattgcaggtgggagtcaccatacccagtctaaactcttccacgtttaatccctccagcaggtgagagtatcgtgcctcactccacacccactagggtcccgtgactacagtcctggctgagggcactgggccacgtctgggtgtagaaaagaccctttgggccaggtagcagactgcaggctggaacaagggtgccagtagaagacagcagctgagctgaggccagggcctaggggacaaagaggcgggggaacggacagcagagtcgggggcaggaggaacagggatcggggcctcgtgggctttgagagaaaaggatgcagcacctaggggtccggcctagagactgggagacgggaaagtaggggaggagctggttggtggggggcagatagtaagttcagtgccggagacatgaaatgctcccccaggttggagaaaccatcagaacactgggggctcggatgactgagtccttcagaataaaatgggctgaggaagcaggattcctgggttaaagccccagagtcacgtcactgaagaagcccgacaatgtgtgttctttggcattttatttcaaaattgcagcaaagacagagaaaaaaaaatcaacggcagcaccaggggtctggcctgagaacggagagatccggaatcggggccaaggtgtatccttgaccgcacgacaaggagtaatgggcggacctgaacccgcgacgaggggctgggggccaagatgcctgggtcggcccttacggctttgggagtgtcgcaaccacatgggggcgccagagacccagacgccgcccgctggccttttatttcgtattgcacttcaggtgagtcattggtagggaggcgagtgctggcgtgacgagatgctacgggtcggtggatctggagcacagcctgcagcttcacaccgggaacatccactcgtgggctctgattccgtactgcggaacaacggaggcagtgcgtgaggtggaagctgcactacaactcccagtaggccctggggtgttccaggccgagtgcctacggagctgtgccccagcggctcacgggaaatgtagtccacttcccagagggccccaacaatgatgggaacggggaatcaaggctaaggcggcgcagaggcttccgggagatgtagttctgaagacaggaattatggccaggcctctaaggctcttggaaaaagtcactttcagctcagaaagcccagatagtcagaggatgtgtagttctaggtcctgatgcacaaaagtttacagaaatgtagctctaggtctgggaaaggagcccagagattcttgggaaagagatcttggcccagaagatgggaatacccccagagatttatgggattaaacagtctggtgccagagaggggccaaggtccagaggctcatgggaggaagctttctccggccaaagggatagcccagggctccagggaatcttgggaggccaacctctgagatggccagagggctggctaaggtctcagtgattcatggaaagggcctttctcccaccagggcacccggggcagcagaggatcacagggagggagtttctcccaccagggcacccaggggcctcagaggcccacggagagggggtttctcctaccagggcacccaggagccgcagaggatcacaggaaggggtttccaaagctgaagacatatccagggctccgggagctcccaggaaagggtgatttagccccaaggggttttccaggccacagagcagcacagaaagcccactctccagggcctcaataagaaaggccattatctgttcctggtactactgaaggaggctggctgttagtccaggggctcatgggacaccaacttctccagggaacaagctcccagcccattccccagctccctgcagctcacctggatctccttcagctccttctggaagcggaggatcagctcaggcccattttccatggtgggaatgtggaggttctgggacagaaggtgcggtgaggaccaagcccctcccctccttccctcccacccacaatggcagccccgcctcaccctgtctttgtacaggattcggtgcactgggcagacctggcaagcggtgcccgagccaaagacttcccgcacgcggccctcctccagggcccgcagcaactgcttcatggtgatcgtgcgctccaccacccggaactcaccctgcagggcagttggcagagacacgtgtccccagagggttgccctgctgcagacctccacctctccctccctgaggatagtgagaaagacagaggcccaacgggagagacagacccaggagaaggggcagagacatgccagtgtgccccagtcccagccctctgatgccctggcccctggcacatggcgcccatcaccagaagatgccatgtcctcacccaggtctgagccatgtccagtagactctgtctgaccactccaggcaggataacaccattcagcgggggcgtcaccagctccagcactagggcaggtgtaaggggtggaagatgttacctctcaccccctagcaccgccgtcttaagagccacccccttcccccatcccagaatccctggggcctgtaacctgccaggaatgatggtgccacccacttccaccagggttcgggctgggtcatgggtgggcttacccccatcttcgtgggtccagtagacaaagatgttcatggttcccacctcggtgagctggtggtcgggcccatacagccagaggacctgttcacagccccgcttgagtgcctcctgttgcactaacacggtgggcccataattcctggtggagggcagtctggttgggtggggcaagggagccccatccttccccagcccagccccagaggaggctcatcctactctctcccgtctccctgctcacagctctcacagggctccccagttcccctgagatggaatccttgacttttcatttggcatcaggaccctaaatggttatgtcccctctctcctgtctcttcccacttttctttcttttcttttcttttttttttaagacggagtctcgctctgtcacccaggctggagtgcagtggtgcgatcttggctcactgcaacctccgcctcccaggttca[139 bp omitted]aaccatttctttttttctttttttcttttttttttttttgagacagagtcttgctctgtcgcccaggctgaggctagagtgcagtggtgcgatctcagctcactgcaacctccgcctctcgggtccaagcgattctcgtgcctcagcctcctgagtaactggagtaactggggcatgcagcaccatgtccggctaatttatattcacatttatatttatatgcccgcctcagccccccaaagtgctgggattacaagagtgagccacagcgcccggccttactttttatatttttagtagagacggggtttcaccatgttggccaggctggtctcaaactcctgacctcaagtgatccgcctacctcggcctcccaaagtgctgggattacaagcgtgagctaccgcgcctggctccaaaaccgtttctgttgtcacctcctcgagaggtgtttccagacctccaggctgggtgctggaccttccctggactcccccagtgaactgggctacctggatgactttctgagtctctctcccagagatagcctctcccctcagctgctaacaagcctcccatggctccccagtgccccaggacaagaccctagcctccttccggcattccaggcctgcctgggtctaatgaatacttgctaagcatttttcaaaacccaaacttatttttgtaacctgaacatcttctgtgatcctattccttctgtccctgtacacatggttcccaggactggaaacagtttgctgacttttgtacccaggaaaccccctcctccctcctcgtcagacctagttga[139 bp omitted]gcctcctgagtagctgcgactacaggcgcccgccaccaagcccggctaatttt[182 bp omitted]aacatgcagctccgaatactggggctcccaccagcctgggagacccaggagagcagggctcggggctgactcatctgtgtccccagcttctgccagcacagggcctggccctcaggagacctcacaggatgtggctgaaaggacctgaatgcacccccagctggggccacattcctgtcccaacacgccagtgcccaccctctgccttggttgcccaggagacccagctgtctccttcctgccctgctgagctgaggccactgggagacagatttacacagaaagtccacacgggggtgaggggctttggaggctcaaacgactgtgggagctgggtatggggagcgcagcccagcctgggggatcaggggaggcttctggggcgagaagccaatgagctgagtgtaagcttcactcctggaggcttccagggaccagtcctggtttccccactgacctccacccaatgccttcccatctgtgagcctttttgtccatctgaaaaataatcccctcctccttccttccatggtttgttttcagggaccagggaggtcacttagcactgagccctgcacggtgctgatgatgtcaccttcatgtgacatccagaggcatggccgaaagcacgcacgctggtccctgtgtctccaacgcccagtgcgccagtcgttctggggatgggggtgctacttacccacctaacttgtagttgccgaccccgcccacccaggcccggatgaaggctgggtcggccaggagggagaccggggtcacggagcctccagggaagtaggcacccactgggcagagaatgacgaacaggagcgcgcgcgtgggctggctgacacccagcgagggctgcgacgggcaaagggacagcgtcaggagtccaggcccccagtcccttcccgtccccaggcccaggcctccaggaccccacccctgccctgcagaatccaacccccgcagcccagcttcccagccctggagttgggcccacctcgttcccaatgagcacaggccgcacatagaggctggtgccggcggcatcggggacccagtccttgtccacttcgatgagccggcggatgcactccagcaactccagcttgtcgaaactctgggtgggattctgaatgagtcaaggggcccttgctgccccggccccagccctcctccccaccccggtggaccgggacccctcaccggcaggcacaggcgcatggctgagcgcagcatccggtccatgttgagccaggggcggaagaggcgcacctgctggtctttgcctttgaacgccttcatgccctcaaacagctgcggggacacgcgggtggggaggctcagagacttctccagacagtcatgagagacaccaagacagacagagacagatacacaaagacacagacaactgaaagatggaggccaagaggagagcaccggggagatttagcagctgggtcagagagatggagaaaaagagagacagatatagacagggagacaaacaggtagag[131 bp omitted]aagaccccatctctaccaaaaaatacgaaaattagccagacgtggtagcacgtgactggagtcccaggtatttggaaggtggtgggaggatcacttgagcctgggagtttgagactgcagtgagccacgatcatgccactgcactccagcctgggacctagttttttttttctggagactctgtccctgatcactgccccatggttccaagtttgcttgttcagcatctgctccactgcagagtggaagagcctggaaggcagggattacccttgacacgtttaccagacagcctctcctgcagtcccatgcaccagggtaggcagcgcttggcacagagtgtttttttgttttgttttgttttgttttgttttgagacagggtctcactctgtcacccaggctggagtgcagtggcgtgatctctgctgattgcaacctccgcctcccaggtccaagtgattcttgtgcctcggcctcctgggtagctgggattacaggcgcccaccaccacgcccagctaatttttgtatttttagttgatccacccgcctcagcctcccaaagtgctaggattacaggggtgagccactgcacccagccagactttttttttttttcccatagtgggtttttgatgaatgaatagataaatgaatggaagacaagcaaaactagctacaatattttggggggataaaaaccaccaccacaaaaatgaggggcaagatggggcaggggcagggagtagccatatcaggtagtaaaacattataaatctacaatacttaaaacagagtgacactgctatatgagtggacagactgaataatggaatagataaccaaatatccatctagagaaaaactacgttgaatctctatttcacacctcacaccagaaaaaattccaggtgcattaaaagtctaaacaaaatatatatatatatattacaccataaaagctatagaaggaaacaaaaataactgttttatatcttggattgggaattttattttttattttatttgagatggagtctcactctgttgcccaggctgaagtgctctatcttggctcactgcaacctctacctcccaggttcaagcaattcttttgcctcaacctcccaagtagctgggattacaggtgcctacaaccacgcccggctaatttttgtgtttttggtagagacggggtttca[142 bp omitted]ctatgttgcccaggctggtcttgaactcctgagctcaagcaatccccctgcctcttcttcccagccccagatgaattttttaaaacctaacctgatagaaaaatcagcctagcaaatggacagttcacacaaaaggaaatacaggtggcccttaagctcgtgagaagatagtcaatttcattaatcactagggagaaaaatgcaaattaaaattagtttgagatacctttaaaaccacatgggagattggaaaagatctaaaacttggacaagggttgtccaaggtatggaaacaggctctgctggtgggtgtggaaactgacacaccctgtagatgtagatgtggcgatacgtatcaagattacaagcatacatatcctttgacctacagttcccgaaattgagcctctagatacatttgcacttaaacaagtgactaaagaagggacgtgtgtactggattccttttttttttttttttttttttttgagatggagtctcactctgccacccaggctggagtgcagtggcgcaatctcggctcactgcaacctccgcctcccgggttcaagcaattctcctgcctcagcctcccgagtacctgggattacaggcacccgccaccacacccagctaatttttgtatatttagtagagatggggtttcaccatgttggcaaagctggtcttgaactcctgacctcaggtgacccacctgcctcagcctcccaaagtgctgggattgcaggtgagccatcacagccggccctgtactagattctttattgcaaaattgtttataatagactggaaacaacctaagtgtccaacagtaggggattgcctaaggaggtgcattgttaggatgatacagcatgaggctgcaagaaagatggaaaaagctctttaagctttaaggtatagagaagaatttccaggcccagtatgatggctcatacctgtaaccccagaactgggaggctaaggtgggagaattgcttgaagccaggagttcgagaccagcctgggcaacaaagtgagatcctgtctttgcacaagatttaaaaattaactgggcaaggtggtgtgtgcctgtagtcctagccactcgggaggcagaggcaggaggatcacttgagcctaggaggcggaggttgcagtgagctgagaccatgccactgcactccagcctgggaaacagagcaagacaccgtctcaaaaacaaaacaaaacaaaacccaggtaaaagagcccggatacaccggatatagtggctcatgcctgcaatcccaggactttgggaggctgaggcaggaggatcacttgagcttagaaatctgagatcaccctgggcaacataacaagaccccatccctaaaaaaaaataaaataaaataaaaattagctgggcatggtggtgcacacctgcagtcccagctacttggaaggctgacgcaggtggatcgctggagcctgggaggtcaaggctgcagtgagccaagatcgtgccactgcactccagcctgggctacagagcaagaccctttctcaaa[135 bp omitted]ggtgaaaccccatccctattatttaaagataataaataaacaaatacaggtagacaaagacagaaagcagactaatggttgtcatgggctggggtgagggacaatgggtactgattaataggtatgggggattaaacagttctgaaccttgatggtgctgatggttgcataacattgcctgccactgaattatgggctttaaaatggttggaggctgggcgccgtggctcacgccagtaatcccagccctttgggaggatgaggcggtggatcatctgaggtcgggagtttgagaccagcctggccaacgtggtgaaaccgtgtctctactaaatatacaaaaattagccaatagtggtgcatgtctataatcccagctactcaggaggctgaggcaggagaatcacttgaacctgggaggcagaggttgcagtgagccaagattgtgccactgcactccagcctgggcaacaagagtgaaactctatctcataaataaataaacaaacaaacaaacaaataaaatggttggaatcccacatttgatgctgtgtgttattatgtatgcgtattagtaccacaataataaaaaataaggccaggcatggtggctcacgcctgcaatcccagcactttgggaggctgaggtgggcagatcacttgaggccaggagttcgaaaacagcctggccaacatggtgaaaccctggctttactaaaaatacaaaaattagccgggtgtggtggcgggcgcctgtaatcccagctactggggaggctgaggcaggagaatcacttgaacccgggaggcggaggttgcagtgagcgagattgtatcattgcactccaacctgggggacagagtgagactctgtctctaaataaataaataagaaaaaataaaataaaaaataatacacgtggtcggcctgcaatccacacatgccctggagtgtgggtgacatagggacagcattgtcctactccctcatcctcccccttccgccccctggacccgcgggatcacagcagtgcgttctgtctgccagggccacaggcttcctctgctctcactcagctgaagaaaaagtactgggtccccagccagaggacaactgctgtgctgggctgaagggagaagtgtgtggtggtctccaagtaaccagcttcctgggggctcagcaggcggaatcctgcccatcacgcttatgtactggcaggagtgtctggctgtgattggaggtgtgtgtgctctgtacagaatcgactggtgttgcttagatgtccagagtgggaggggagaggggaaaaaacaaaaccttaaaattctggaaaggaaggaagaaaggaaaaaacagagggagggagggaaaggaaagaaaggaatggaataaaagtcttcatgccacagaactgtgccctggaggactaaaatcagccaacctgctaaccagttactggagctgtaagatgctcacttaaatcttgtctcaaccaaagtttccttctgaagaccttgctttcagccgcagctataagtcctaaaaccaaatgcctcctggatctgtctcctagaaacttcacagtatctcaggctcaccaggtgccacaaagccgctcctcctcctgggtccccatgtggggacaggcccaaggtctacctggtcaccagcccggcttcctagcctgcaactcttgccctccacatggcctgagagggctcttactatacccagacatggccctgcccctcccttcctcagagccctcagtggctcccagcacccttggacaaggccccagcccctcagctcctccatggccctgacattttcagcctccttaaccatgctccaacaccgcaatttctcccaaatgtaccaggctctactcccgtttggggtttggattggctgtctccactcctgccatcccccaccgactgtcccccttcccgccatctccaactgtcccctctcccgccatcccccctgggctgtctcctctcctgccatccctcccccggctggccctctcccaccatcacttccccggctgtccctctcccgccatccctcccccggctgtccctctcctgccatccctcccccggctgtccgtctcccgccatccctcccccggctgtccgtctcccgccatccctcccctggctgtcccctctcccaccatgcctcccctggctgtcccctctcccgccatccctcccctggctgtcccctctcccgccatccctcccctggctgtcccctctcccgccatccctcccctggctgtcccctctcccgccatccctcccctgactgtcccctctcccgccatccctcccctggctgtcccctctccagccatccccctggctgtgccctcccccaccatctccccccccaatggctgtcccctctcccgcgatcatcctggctgtccctctcccgccagccccccggctgtcccctttcctaccatcaccctgtcacctctcccaccatccccctctaagcttccctctatgccagaagaagccatgctttctttcaagtgaggctgggggtctctactggcctccacagggcctccatcagagcacagatcatactgagttatgcccacagcatggggttttccaagtgaaggaaccgggtctgctcatctcggggaacccagcatcaccaagcatgagcctggagcatggaaggcctcagaaaacaaatggtgaatgcacagaaaggagaaacacacaacaaacaaaccaagagaggtacacctggcaagagacacagcaaggaggaggagatgcagacagggacagggagagaggccggccgccatgccacctgcagggagtagtggaggctggaggaggctgggtgcagcgtgaggttctggaagggctggattcggggctggccccagcccttgtcattccattccaccatcagcatgtggtcggtaaatgtcttcccaaacaccaggggctcgccggggccaggcttcttatgaggcttctgtgtcatttccagctgcaggtctgcagcctgaggaaagacaggggtatcctagaatctggccacaacctcccagctgaaaaactacaactcccatgaagccctgggcctcagacccatagagaagaaggacctgtcaccctggaggattctgggacatgcagtttcatcccttgtctgcggcccaatggcaggctgttaagctaccaccactcactgccatctctgggctgtggaccttttggagatgcccaaaaccagctgccagccccctcctctctcagagccaagcatcgagttccctcctttcaccttgaaactggaggaggcatatcttctgggaccacacagaagccaagggacagagagaagctttcgtgcccagatctgggtggagaaagaagtgagagagggggtgagtggggcacagcaggggccctggcagctcgctcgccacctcctgcacttggaggtcccactggcctgcctgttctgtcccagtttcagtccattctagacggggcaggtggtcctgaaggaggccaagtcccctccctgccctgacgagggctcgctggaaagagctgagtcagctcccgccccctcctccatgctgcggcaaagtcaaacgcaagcgcctcccaccccagagacctttggtcgcagcctggagatcagctcagacaagaaaacaaccagggaaggcacacaggtaagtgaaggcctccgggtacccaagtgctgacaggccttagaagaccaaggaccgacaggtcctgctcccccagagctcaggggtgcagaccccaggcccgcctccctcagacctaagtaagagtccagactctagctgcctcctccctcagacccgaagtctgggcccccagcccctcctccctcagaccctggagtccaggcctcagaccctcctcccttacatccaggagtacaggccccacccctcctccctcagacccaggagtccagttccccagcccctcctccgccagacccaggagtacaggtgcttattctctgaaggtattcgatcaactgggctctgattacctgaaatacaaacccattttggcagtgactccaattcccttcagcccctggggctgaggggcagctacaggggcctggggagccactgcagtcctcactgcatgaggctcaggcgggtcctcccagaggggagtaggaagagcaggtctggctgtgtccagcaggctgggccctctctggtgacctttgacctcacaaggcctctttccccagccctgtggggaggcgttggggcgtgaggttgagagagacagagtggcctggcctggcctgccctgtgagctgggtgagttggcactgattctggaagatggacgtgaatgggcgtggtcacttgtcgctaggtgagttgctgggagatgggcctgcagcgtggtcttgctggtgtgaggctccagggattccggggtgatcagagcgtgggtccccagattgcctttgggtggcgacatctagactgctcagccttgcagccatgcttctgcccagagggataggacacccacagtatgagagacacaaacacagtgcgacagccagcctgtgggcaggagagctgccctcagagccaagatgaaaaaaagagagtaagagatggaagaggaaggatgagaaaaagaaacacagaaaggggcgcacaaacagaaaaaaaaaaaaacaaaaacagaaattgacgccaagaaacaagagatgccaaaatagatctaatcatagaaagaggccacacgcagtggctcgcgcctgtaatcccagcactgtgggaggccgaggcaggaggatagcttgaggccaggtgttcaagaccagcctgggcaacatagggagaccctgtctctacagaaaatacaagttagctgggtgtggtggcgggcgcctgtagtcccagcaacttgggaagctgaggcaggagaattgcttaaacccaggaggcggaggttgcagtgagccgagatggtgccactgcactccagcctgggcgacagagcaagactctctgtctcaattaaaaagaaaaaaaacaaagaaagaaagtaggcagctggctcagtagctcatgcctgtaatcacagcactttaggagacagaggtgggaggactgcatgaggccaggagttcaagatcagcctgggcaatatagcaagaccctgtctctacaaacaatttaaaaattagccaggtatggtggcacacacctgtaattccagttactcagaaggctaaggtgggaggatcaccttgacctactggtcaaggctgtggtgagctacgatcacactgctacactccagcatgagtgatagagtgtctctcaaaaaaaaaaaaaaaaaaaaaaaaaaaaaagaccagcatggtggctcatgcctgtaatctgaggcaggtggatcgcttgagcccatctactcgggaggctgaggcaccacagtcacttgaacccatgaggcggaggttacagtgagccgagatcgtgccacggcactccagcctgagcaacagagcaagactcggtcaaaaagaaaagacgagacaaagaaataaagtacgtttgggggttcacagggcaggtctctataatgtgatagaacctccattatgtcccatacagcccaggagtatcaccatcaaagaccaggagtgtcactgtcaaagcccagcagtgccctccatactccaggactgtccccatatcacggccccggagagaccccatcataccgcagtctgcccttgtcacagcccacacatgaccccatcacgtctagaactgccccctttatagcccaggactctcccccatcacagaccagggctgttctatgatggcccaagatgctccacatcacaagtccagattgtgcctgtaacttatcagaactggtccccagcagagccaagtactgtcccaaacagctcaggaatgtcccctatccaaagcccagcacttttccccattataaccagcattgtctctgccaaatatcagggcttatttcctattcaccaggtctgaaattaaaaaaaaaaaaaaaatcccattgttgtctttttcaatccccaggactatccctatgttgctgtctaggccagtaccttccagactgtccctaccatggtccagcactgtcctctccacaccccgggactgtccccatcacagctgaggactcagcccaattatctccattacaggatatctctatcttcatcagagcctaggaatgtcccatcatgagttcagggccattctatgacaccagaactgtgccatgatgagacggtccacatcagtcccaagtggacctgtcaaagcccagtactgccccaccacagtccaggagtgtcaccactaaagcccagattgcccacataccccaggtatcccaggactatccctatcagtcactaagagccgaaaaaagtgaaattctgccctgacattcatcagctaggataagagactcaaataaagtcaggtgtaaagttaacagacagttctcccaaggttacaccgcagctgtgaaggcttgtaatgacccctttctttggctgtttccttcctcactgagaaaccttgttctctgaaatcatagactctgggaaacgctgctgctgtttgacatcgcacagtcagaagggatcgtctcagccagcctgcagcatctgtcactttgaccatgagacgctgcctcgatttccaatccaggtgcaaagcttcagataggagtttgggaagcacagcaatccccatctcttatttttttcaactttcattccaagaaaataggaccttgagtccaattcccagagctgagacttgaggtccaactctgccttcacctgcacccggccctggaggtctgggcccctttattccagctcccgcacaggctgatgccccaccgcaccccagggctccgctccccaaatcacaacctccccacccccacgcctccctcattacagggtcctccaccatgtttccctttttttttttttttttacctccccgccaattacttgccccacctcatccgcgtctacctgctccccctcaccccattaaagcctcgtgctcctttccaaagggcgccatcctcctccgcgccctgcagcggaaccccagggcgggaggagcggcgccgagtcggaccggctgcaggccagtggtcttcccggaagtgcgcctcccccggttatttcccagaccccggcgcggggctgcgaacccacctgccccagagcggctgcggccatgatccgtgcggcgcgtaactgtgcccgcccggggcgcggctccgaagagagacgttccggccacgccccgctcacgcctccttctgggggaaggcggccgaccagcgccccaggccgtcccagctccagggcgtcggcagggagccggacactgctgcggggcgcaggcgctggtgggagggcaggacttgaaatacggtccctgccaggcgaagtggctcaggtctgtaatcttagcactttgggaggccgaagc[132 bp omitted]gaggcaggagaattgcttgaatcggggaggcagaggttgcagtgagccgagatgatgccactgcactccagcctgggcgacagagtgagactccgtctcaaaaaaaaaaaaaaaaaaaagtcctggcttggtggctcacacctgtaatcccagcactttgggggccaaggcgggtggatcacctgaggccaggagttcaagaccagcctggccgacatgggga[134 bp omitted]aaaccccgtctctactaaagatacaaaaattagccgggtgtggtggtgtgcgcctgtaatcccagctactagggaggctgaggcaggagaatcatttgaaccctggaggcggacgttgcggtgagccgagatcgcgccactgcatttccagcctgggtgacagggtgagactccgtctcaaaataaataaataaataaaaataaatacataaaaatacaaaaattagtcgagcgtggtgccgggggcctgtaatcccagctattcgggaggctgaggcaggagaatcgcttgaacccgggaggcggaggttgcagtgagccgacattgcaccacagcactccagcctgggcgacagagtgagactccgtctcaaattaaaaaaaaaaaaaaaaaatcgtatccctcggccatcgtgtctcggcaatcctaccctgggacactctgtctccaaattctacccccacagtgcccccaagtcctgtccccgggtcactatcctgccacccctaacagccacaggcccaaacagccaaaccgcgggacccttccctcacagggcgtcgccctgtttttctgcgctccgccccagtcctcctgccccacccgccagccccgggctgtagggtcggggcccactgacagctcccgcccccgccgcggccaatcagcggttggtgcacacgcccccccggccacagccaatccgcagcagccctgcagctccacccctcacctgggggacgccagcgcacccgggccctgccccccccctgggtccagctggggagtctgcgtcccccagtgccctgcggaccaaaacccaggagtttcagcccctcctccctctgatccagatgtctcaaccccctactttctcttccctttggacttttcttgccagccaccttcctattctacaggcagtgagaggaaaactccttttccctgagggccaagagtaagagggccttctgcgtctccccctccattacctcctaattagcgcttaatttactctcccctgcgggcctttagttagcgcgctggtgaagccaaaccgctctacccttcccaggagcccctggcgacagcgacagggctagcaacatcaggcacctgcttgctgcaaggcctggggttggggggcggggggagctgcagtccttcagggtcgaggcaacttgtgggtctggggtgcaagggctaagtggggcagaaggactcgtctaaaggatgggaaataaatataacgatatcctcctccttctggctgcaaatcgtttttatgggaacctgcagggtgacccggcaccttgctaactgggcttagagtctaagggcttgggggctgcatctgatacaggttggagtttggggtgggagagtcctaggaagggggccccaagtagaaatgagagaaatcaggaagggatatcgggggcgtccacgggggtgctccgactggccttgcacccgtaccccagctctgcaccccccgtcacgagcagttcaatgcccgtgcagaagttggcttcggaggccaggaacactgccgcagccccgacctcagcgggctggcccatgcggcccagtggctggggagaaaagaggggggaaggaggtcaagaggagccccacttgatcgccatgccccccacccccatgccaccttctaccacctggatctgaaccccacttctacctgggccagcatgccctctcggattgtggccctagggtctggcattaaggctgccagctcctcccacagcggggtccagatgtttcctggggagatactagaggaagggagaggggggatcaaagcaatctgtctcgaaccacttgggatcactcccagtcaccccagtccccccaggaggctctccgcctgctcagagcagctcaccagttgactcggacaccatatggactttcatccagggccaaagctttggtcatggctgttactgccccctgcaggaaatggagcggggaagaaagttcagtccccgggacatggggtccctgccatccattgtctcctgccagccaggggggcatcagaatggggaagtcatgccctccttgaaggctgccttcagaggcaccaggcttggtttcttgggagaaacttggcatagaaatctgtcacaggaaggccaggtgcagtggctcacacctgtaatcccagcactttgggaggccgggatgggtggatcacttgggccaggagttcgagaccagcctggccaacatggcaaaaccccatctctgctaaaaatacaaaaattaaccggacatggtggtgcacgcctgtaatcccagctactggggaggctgaggcgtgagaatcgcttgaacccatgaggcaggggttgcagtgagctgagatcatgccaccacactgcaacctgggtgacagagtgagaccctatctaaaaaaaaaaagaa[132 bp omitted]tgaaatctcgtctctactaaaaaatacaaaaatctagctgggcgtggtgacagccacctgtaatctcagctacttgggaggctgaggcaggagaatcacttgaacccgggaggcggaggttgcagtgagccaagatcacaccattgcactccaacctgggcaataagagcgaaactccatctcaaaaaaaaagaaagaaagaaaagaaaaaacagaaatctgctgggtgcggtggctcatgcctgtaatcccagcactttgggaggccaaggcaggcagatcatgaagtcagaagatcgagaccatcctggctaacatggtgaaaccccgtctctactaaaaaatacaaaaaaaattagctgggtgcggtggcatgcgcctgtagtcccagctactcgggaggctgagtcaggagaatcccttgaacccaggaggcagaggttgcagctgagattgcaccactgaactccagcctggtgacagagcgagactccatctttaaaaaaaaaaaaagaaaagaaaagaaaaaacagaaatctgtcacaggcagttatgcctgggtgctgcatctgggagttaggtgtgagactttctagggccaagatcttgctaggtctggctcctaagttgtctggactcaaagccaaggcccatgggaaggagtagggagggaaggaaggggtaggggctgccataccttggtggccacatagggaactgcctgggcctggccgattgcccccaccaggctggagatgttgatgacattcccttgactcttccgcaggtaggggagggcgagctagggagacaagaggccaagtaagctacacaagccctgcatcttcgcagaccactgaaacacagccacagccatcctgatgtctgggatgacggccacctccctggcatgtttctagttgatctcagtgactgctagagacggcatctaacataacaccctctctggtttgccctggggtcgctgggtctcagcactcaaggagtctctccttggtgggaagggatttctctctcttctcctcggtctctgactctgtctttgtctctacctctgtcccttctcccttggtctttgtatgttactcaaattcctgtccatatcaagacaggaaaatggatgagagatccagaaggctgcatatttttcaaaaatgggatgaagttattttccggtgaagtctctgtggcccaggctggactgcagtggcacgatcatagctcactgcagcctcgaactcctgggctcaagcaatcctccccgctcggcctcccaaagtgttgggattacaggcacgaggcatcacacccagccaggaagttcttttatccatggagggggagatggtttctatgaggccttcatgaaaggcactctagaccaggcacagtgtctcacacctgtaatcccagcactttgggaggctgaggtgggtggatcatctgaggtcagaattttgagaccagcctggccaacatgatgaaaccccatctctactaaaaatacaaaattagccaggcatggtggtgcattcctgtaatctcagctacttgggaggctgaggcaggagaactacttgaacccgggaggtggaggttgcagtgagccaagattgcgctactgcactcgagcctgggcaacagagcaagactccgtttcagaaaaaaaaaaaaaaaaaaaaagaaatgcactgtttcctgccaccgtttctcctgcaattcaactccctggccacctgggaagtccctaaatactctctctgtgtgtgtgcgtgtgtgttcgttgactacacatgaccttggataaactcaaattctatctttgatctcgcttgccttagaaagctgagctggccaggcaaggcctgtccctgccacttaagactaattggtacaaggcagcacccctagcaggctctccgagtgggaatctaaatgagctccctgcccggttccccccaccaactctttcaagccatttctgctcccctcccaaacgacctccacccttttccgtgctgtatcttcgacacaccctgcgtgttcaaacctcagggcctttgaacttgctgttccctctgcctggagtgccttttcctaagagagccacatgacccactcttagggtggccagccatcccagtttgcccaggactgaagggtttttggggacatggtattttcagtccacagtgtcaatgctaaacggggactttcctgggtaaacactccctcagctccctcaaaccctgatccgaggtcacctcctcagtgaggtcttccctggctatactgtttaaagctgcaagccaggatcactagctcacacctgtaatccttgcactttgggaagccgaggagggaggattgcttgaacccaggtgtttgaggccagcatgggcagcttagcaagaccctttttctttctttctttctttctttctttctttctttctttctttcttttctttctctctctctctctctttctttcagatagggtatcactctgttgtctaggctggaatgcagtggtgcaatctcagctcattgcaacctccacttcccaggttcaagcaattctcctgcctcggcttcccgagtagctgggactacaggcatgtgcccccacaccaggataattttttttttttttttttttttttagtggagacagggtttcactatattagccaggctggtctcgaactcctgatctcacatgatctgcctggctcggcctcccaaagtgctgggattccaggcttgagccactgtgcctggcctgtctttattttttttaacaacaaaaaaatattttttgttttattttttgagacagagtctcactctgttgcccaggctggagtgcagtgatgtcatcttggctcactgcaacctcctccccccaggttcaagcccttctcctgcctcagtctcctgagtagctgggactacaggcatgtgtcaccatgcctggctaatttttgtattttttagtagagatggggtttcacc[132 bp omitted]ttcccacacccctgggtccccttccctctttcagatgtcttttctctgtgtcacacactcccttctgacaggccatatatattttacttgtttgttcatgttctgtctctcccaccagcatgcagaaacctatgagggatggtcaagatttcttattttgtttcttccccagcactaaaggtgcctggcacatagcacatgcttcataaatatcctttgaatgaatgaatgggtgaattaatgaatgaatggaggacctggtatgtgtccagccctgtcctcagcaatttacatggattagctcatttcatccctctaacattctcctgtacctacaagaaggaggtacagctgagagtcccatttcacaagcgaggagactaaggaatggagggatgattgacgcccgcagggcatcacgtgacacctgacagcaccagcatttgctgctggacaggctgagacccaaacccataaacaaacaacaatttctcacaattctaagtattaagaactttaggccaggcacagtggctcacacctgtaatcctagaactttgggaggctgaggcgggcagtcacctgaggtcaggagttcaagaccagactggtcaacatggcaaaaccccatctctactaaaaatacaaaaattagccgggtgtggtggtgcgtgcctgtaatcccagctactcgggaggctgaggcaggagaatctcttgatcccgggaggcagaggttgcagtaagccacaatcgcaccactgcactccagcctgggcagcagataaagactgtctcaaaaaaaaagaaaaaagaaaaaagaaaaagagaaaccatgctctaatatgaacgtgaatgatgtgggcattgaccagcctctgccctcctcctcagggaacctctcatcctcgcctcctctcactcccaccagccgtgacaccctccctccctcccagtgcccaccccacctgccttgctccatttctctctcagtctgtgcacctgccctgctgtttaatctcctcccccacctgaccctgcaaacatgagtctcaccagggctgagacacggatcttgccaccctcaccccagcacgaggcacacagctggagctcagtaaatatttgtcccacactccctgagtgtccttctccccacacccctcaaggttgctaagcacctgctctatatcaaggacccgctgggggccaggtgcagtggcaggtacctgtaatgtcagtgctttgggagactgaggtgggaggatcgcttcagtccagaagttcaaggccagcctgggcaacatactgagaccccagttcttaagtgccaaggttctgagacaggagcaggcctgttgtgtttgggagcaatgaggccagtgtggccggaggtgaggtcagagaagaacaggggccagatcacgaggccttgaaggcccccacttctcccttggacaaatgcaatcaactcctttttttgtttgtttgtttcagagacagagtattgctctgtcacccaggcttgagtgcagtggcacgatctcggctcactgcaacctccacctcccaggttcaagcaattcttctgcctcagcctcccgagtagctgggattacgggcgcctaccaccacgcctggctaatttttgtatttttagtagcaacggggtttct[142 bp omitted]cgcttaaccctcagatttgtccctcatacctacaggagccagagcctatgatctgttaataatactaacaggatcacatcactcccttgctcaaatacctgccacagctccctattgctcttgacataaagaccagatgattcagcatgcccttcaaggccctgcctgatctggttcccaccccaatctcttcttgcaacatcccgttctctcactgggcccagctggcagcagcaccaaaccctgtctcgctgccaggccctcgccctgccatctctttctccacctcctccactggtcaatgctgctcagatttcattacttccaggaagtttggctacattccctgaacgggccagcctccaggtcacactctcccagaaccacacccatccccctcataaagcaaaacacactcttctgaactcatgtctctgtttaggaagacctggctgcccaggactgtaaactccccaaggacagagcctacatgtacctggctccctgccctatctccagcacctataacactgccagggccaggtgtggtggctcacgcctgtaatcccagcatctggggaggctgaagtgggaggatcacttgagcccaaggagtttgagaccagtctggacaacatggtgagactccctcgcagccatctcaacaaaaatacaaaaattagccaggcatagtggtgtgcgtttatggtcccaggttttcgggaggctgaggtgggaggattacttgagcctggtaggtcagggcttcaatgaactatgatcacaccatggcactccagcatgggcaacacagcaagacccgatctctaacaaaaaacaaaccgaaaaagaacgttgcctgaggctgggtgcagtggctcccgcctgtaatcccagcattttgggaggccaaggcaggtggatcacctaaggtcaagagttcgagaccagcctgaccaatatggtgaaaccctgtctctgctaaaaatacattagccaggcgtggtggcacatacctgtaatcccagctacttgggaggctgagacatgagaactgcttgaacctgggaggtggagattgcagtgagccgagattgcaccactgcactccagcctgggtgaaagagtgagacaccatctccaaaataaaagaatgttgcctggcttggtcagtacttgactaaatagaggactgaatggatagattttttttttttttgagatggagtctcgctctgtcttgcccaggctggagtgcagtggcgcaatcttggctcactgctacctccgcctcccaggttcaagcaattctcctgcctcagcctcccgagtagctgggattaccaccatgcccggctaatttttataattttttagtatagacagggtttcggccgggcgcagtggctcacatctgtaatcccagctctcagggaggcagaggcgggaggatagcttgagcccaggagttcgagacctgcctgggcaatatggcgagaccccattctccacaaaaagtaagaaaaaaaaagacaaaaataaaaaaaaataaataagtagagacaggttttcaccatattggccaggctggtctcaaacccctgaccttgtgatctgcctgcttgggcctcccaaaatgctaggattacaggcgtgagccaccccacccagccaggatggatagatttttttttttttttttttgacagagtctcactctgtcacccaggctggagtgcagtggcgcgatctcagcttactgcaacctctgcctcccaggttcactctattctcccatctcagcctcctgagtaggtgggactacaggcgcccgctaccacgcccagctaattttttgtattttttagtagagacggggtttcaccatgttagccaggatggtctcgatctcccgacctcgtgatccacccgccttggcctcccaaagtgctgggattacaggcatgagccaccgcgcctggcctcagaatggatagatctttaaggaacaatccagctctgagagactacaactgaaacccctgtgttcaacaccttctgtggatccctactgcccacaaaatataatttccttgactatctaaatatccttaatcccgcccttgttttccctagcctagggagtcacaaactttggcttgtatcagaatccaccaggaaggccaaagacctggagattctaattcaagggatctgggcaggggccccagaatcaacatttaaagagcttccaaagtcacgtggctgagagagaagagaaaaaaagagagcttctatgggattttgatggtgatggtgatgatggtgatgatagtgataatgatgatgatggtgatgatgataatggtggtcatgatggtgatggtgagtatggtggtgatgaggatggtgatggtgaggatggtgatgaggatgatgataaggatgacggtgaagatgctgatgatcgtagtgatgatgatggtgacggtgatggtgaagatggtgatgatggtgaggatgatgatgataatgatagtgatgatcatgatggtgattttggtaatgatgatggtgatgatgataatggtgatgttggtgaggatggtgacgtggtaatgatggttacgattgtggtaatgatggtgatgattgtggtaatggtgatgatgatggtgatactggtgaggatggtgatggtggtgatggtgatgattgtggtgatgatggtgatgattgtggtaacaatggtgatggtgatgatggtggtgatgatggtggcaatgatggtgatgctgatgttgatggtgatggtgatgattgtggtaatgacagtgttgatggtgatgatggtggtaatgatggtgatgatgatgatggtgaggttggggatggtaatgatggtggtgatgttggtgatggtaaattttagtaatgacggtggtgatgatgatgaggatggtgatggtggtgatggtgatgattgtggcaatgatggtgatggtgatgatggtggtgatgatggtggcaatgatggtgatgctgatgttgttgatggtgatggtgatgattgtggtaatgatggtggtgatgatggtgatggtaattgtagtgatggtggtgatgatggtgaggatggtgatgacggtggtaatggtgatggtgatgattgtggtaatgacgatggtgatggtgatgactgtggtaatgatggtggtgatgttggtgatggtaaattttagtaatgacagtggtgatgatgatgaggatggtgatggtgatgattgtggtaatgatgatggtggtgatggtgatgatgattgtggtaatgatggtgatgatgatggtggtgatgatggtggcaatgatggtgatgctgtcattgatggtgatgctgtcattgatggtgatggtgatgattgtggtaatgacagtgttgatggtgatgatggtggtaatgatggtgacgatgatgatggtgaggttggggatggtaatgatggtggtgaagatggtgttgatggtgatggtggtgatggtgaaaatggtgatggtgaggatgacggtgagaatgatggtgagggtggtaacaatggtaatgatggtgatggaaataacgatggtgataatggcagcgacacaagtgttcacaagattcctttgcaacaagtgcatgaacaagcagacaaaagtctttgccctcagggaaaacaaaggcaatatgcaaatgttgtcgggatcctggtgtgaacaaatcagctgtaataaaacatttgggaacttctgggtgtatttaaatagagttaaatatgagatggtatcaagacatttctgttaattgtattaggtgatataatggtatttttgttatgtaaaaaaggcctgagcctggacaaaatggtgagactctgtctctacaaaaaaataaaagattggctgggcgtggtggtgcatgtctgttgtcccagcaacctgagaggctgaggtaggaggatcacttgagcctaggaagtcgggactgcagtgagccatgatcatttcactgcactccagcctgggtgacagagcaagacactatctcaaaataataataataataatgctttatttttaggagatgcttactaacgtgtttggaaatgaactgtcattgtgtcgtaatatactttataatactttgacaaaaagaaatatatacatttatgtatatacagacacatatatatggtgtacaaaatgtgaattaatgctaatacaaatgatgggcatataggtatttattatactactatatttttcttttcttttttctttctttttttttttgagactgagtcttgctctgttgcccaggctggagtacagtggtgcaatttcagcccactgcaacctccacctccctgggtccaagtgattctcctgcctcagcctcccgagtagctgggattacaggtatgcgccaccctgccccgctaattttttttgtattttcagtagagacgtggtttcaccatgttagccaggctggtcttgaactcctgacctcaggcaatccgcccgcctaggcctcccaaagtgctgggattacaggcatgagccactgcatccggtctat[135 bp omitted]accctgtctctcctaaaaatacaaaaattagccgggcatggtggtacatgtctgtagtccagctacttggtaggctgaggcaggagaatggcttgaacccaggaaggcagaggttgcagtgagccaagatcatgccattgcactccagcctgggcaacatagcaagacctcctctctactgaaactaaaaaaaaaaaaaattagtcgggtgctgtggcatgtatctgtagtcccagctactcggcgggctgagaggatgaggtgggaggatcccttgagcccaagagttcaaggctgcagtgagctgtgatggcaccactgctcaccagctgggaagacaaggaaaggaggaaagaaggaaagaaaaaagggagggagggaggaaggaagaaagagagaaagaaagaaagggccgggcgcagtggctcacacctgtaatcccagcactttgggaggctgaagcaggcggatcacgaggtcaggagattgagatcatcctggccaacatggtgaaaccctgcctctactaaaaaaaaaattagcccggtgtagtggtgcgtgcctgtaatcccagctactcgggaggctgaggcaggagaatagcttgaacccgggaggcagagattgcagtgagctgagatcgtgtcactgcatgccagcctggcgacagagcaagactctaaagaaagacaaaaaaaaaaagaaagaaagaaagaaagaaaagaaaagaacaatggggagtttcagtacacatgaattatctgtactattctaggaatattttgtaagtcttaaattatgtcaaaataaaaataaaaagcattctaatacactggtggtatggtacgcatgaagttcctactgataaaattgtatgatctgggctgggtgcggtggctcacgcctcccagcactttgggaggccgaggcaggcggatcacttgaggtcaggagttccagaccagcctggccaacatgatgaaacctcatctctactaaaaatacaaaaattagccaggtgtggtggcgtgtgcctgtagtcccagctatttgggagggtgaggcaggagaatcacttgaacccagcaggtggaggttgccatgagctgagatggtgccactgcactccagcctgggcgatagagcgagactccgtcgcaaaaaaaaaaaaaaaaaaaattgtatgatctgggtggtggtggggggcaggagtcaacgggtagagcaagttattcttgctttgttttgtttgagacaagttcttactctgttgcccaggctggaatgcagcggcacaatcatagctcactacagcctcaacctcctgggctcaagtgatcctcctcagcctcttgagtagctgcgactacagatgtgtgccaccctatctggctaattttgtttatttttggttgagatggggtctggtgctatgttgcccaggctggtcttgagctcctgagctcaagtgattttcccacctcagcctcccgaagtgctgagattgcagcatgataaatattgataagagtttcatgggtatttaatctaatctcattaaatcctcagaacaactctgtcacaattggccccatttcacaggtgagaaaacagaggagcagaaatgttgcgtaacttgcatgacgttgcaggtaagaagtggcagagaatttaggcaaacaagccacttgttatttctgcctccctgccccgcaggtcctgttgaccaacttgaccaactttatttatttatttattttgagatggagtcttgctctgtcacccaggctggagtgcagtggcgcgatctcggctcactgcaagctccgcctcctgggttcacgccattctcccacctcagcctcccgagtagctgggactacaggcacccgccac[186 bp omitted]tttatgtgaaatctgccttgtgaaatgttggcaatgaatgaaaaaagataggccggacatggtggcttacgcctgtaatccgagcactttgggtggccgaggcaggcagaccgctatagctcaggagtttgagacctgcctgaacaacatagtgagacccccaactctacaaaaaatacaaaaatcagctgggcgtagtggtgggcacctgtagtctcaggtcctcgggaggctgaggcaggagaatttattgagcccaggtagtcaaggttgtggtgagccgagatcctgccactgcactccagcctgggtgatggagcaagattgtctcaaaaaaaaaaaaaaaaaaagtaaaagaaaagaagaaaatatatatatatatacacacacacacacacacacacacacacacacatatattaactcttcatgggctgaggtgtaggtgtgttttatgtgtggaggtgtttttagtgttgggttaatcctagaaagtcaacacaaatttggaacaggagccagggttcactggttaagcaggggattgcccaacctcccgggaacatttcacctggatcttggatgcgacctcagagtcagcacctgaagctccctggacactgggcccgcccccaggcctctcccctctttgcctactcttgctcccctgagttcctccagcctcaaactggtcagctgcaagctggtatctccagagccccacctccacgatctcatgcccaatgcccattcccaccaggacgtccaccaggcagttcatgttcaacagcgcccccgccaggctttcctgccacagtgaatggcagctctgtccggtcagttgctcagttgctgg[136 bp omitted]ctgcctcagcctcataagaagctgggattacaggcgcccaccaccacgcctggctaatttttgtatttttagtagagacggagtttcaccatgttggccaggctggtctcgaactcctgacctcatgatctgcccgccttagcctcccaaagtgctgggattacaaagacatgagccaccgtgcctggcaaggacagggattttcttctgttgtgtgttcatagctgtatgcgcagggctccgcatgttgctggtgctatataactatttgttgagttaattaattaaaaagtgctatgcggagaataaagatgttatggagagtggatgtttgtgtgcagctgttgcataagcaagggtgagggaaaggctttgatgtgtgttcttctccttcgtttttttttagatagagtcttgctctgttgcccaggctggagtgcagtggtgcaatctcagctcactgcaacctccatctcccaggttccagcaattctcctgcctcagcctcacgaggaattgggattacaggtgctcaccaccatgcccagctaattttttgtgtatttttagtagagacggggtctcaccatattggacaggctggtcttgaactcctgatgagtgatccacccgccttggcatcccaaagtgctgggattacaggtgtgagccaccgtgaccaacccttctccttccttttttttttctttttttttttttgagacggagtctcgctctattgcccaggctggagtgcagtgatgcaatctcggctcactgcaacctccgcctcccgggttcacgccattctcctgcctc[212 bp omitted]gaatcaagagaggcggtgattacaaaagttgttcatcaggaattgtcattggtttacagacatcacattgattagtgattggctatacatgtttgaactatagagtgtgtgacactctagagctacttggtatcaggtcgtctagagtccagaaaccaagtagcctcaaaaggtaattattggatgggtgcagtagctcatgcctgtaatcccagcttgaggcaaggagttcgagaccagcctgagcagcatagaaagaccctgtctctacaaaaaagttaaaaattagtcagtcatagtggtgcacccctgtggtcccagctgctcaggaggctgatacaagaggatcacttgagcccaggggttcgaggctgctgtgagctatgatggtactccagcctgggcaacagagtgagtccctgtctcaaaaagtaattaaaatacatttttataaagtccctctgagccaggtgcggtggctcacacctgtaatcccaggagtttgaaaggctgaggcaggagaatcacttgagcccaagagtttgagaccagcctggacaacatagtgaaaccccacctctattaaaaaataaaaaggccaggcacagtggctcatgcctgtaatcccagcactttgggaggctgaggtgggtggatcacggggtcaggagttcaagaccagcctggccaacatggtgaaacctcgtctctactaaaaatacaaaaaaattagccaggcgtggtggtgagtgcctataatcccagccactagggaggctgaggcagagaattgcttaaacctgggaggcagaggttgcagtgagccgagattgtgccactgtactccagcctgggtgacagagtaagactctgtctcaaaaaataaattaattaatttttaaaaaagttgttaaaaagcccctctgggcctgatcctgatcatctaaaggggctctcctttctcagataaaaaagtttgttttctttctcattccctccccagctctcccccaattcttgtttaagacaaggactcgctctgttgcccaggctggagtgcagtggcacaatcacggctcactgcagcctccagctcccaggttgaagtgatcctctcacctcagcctcccgtgtagctgggattacaggagcaccaccatactcagctaattttttttttttttctgagaaagagtttcactctgtcacccaggctggagtgtagtggcacaatctcagctcactgcaacctccacctcccaggttcaagcaattctaccgcctcagcctcttgagtagctgggattacaggcacctgccaccacgcacagctaatttttgtatttttagtagagatggggtttcaccatgttggactcctgacctcaagtgatctgtccgccttggcctcccaaagtgccaggattacaggcatgagctaccaggcctggcttttttttttttttttttttttgtgagacggagtttccgctcttattgcccaggctggagtgcaatggcacgatctcagctcactgcaacctctgcctcccaggttcaagtgattctcctgcctcagcctcctgagtagctgggattataggcatgtgccaccacacccggctaattttgtatttttaatagagatggggtttc[135 bp omitted]tattttttttttgagacaaggtctcactctgtcacctaggctggagtgcagttgcacgatctcagctcactgcaacctccgcctcctgggctcaagctgtgataccctaaccttgttttaacctgaattgactctcccttaggtgagcgagccagacagactccatcctggctccttcacttgcagccccttaacccaacccccctttcttcaaggacttaacttgtgcaagctgactcccagcacatcaaagaatgcaattactgataagatactgtggcaagttatatccgcagttcccaggcagtcgcccgattaatagtaccctaagcccccgcgtttctgtctggttgatagcgcccaacgtccagcgtctatcaccttgggatgtgtttaaagcccctgcacctggaactgtctgctttcctgtaaccatttatctttctaactttttttgcctgctttacttctgtaagattgttttaactagactcccccctcccctttctaaaccaaagtataaaagaaaatctagccccttcttcggggccgagagaattttgagcgctagccgtctctgggctgccggctaataaaggactcctgatcttgtctcagagtgtggcgtttctctataactcgctcggttacaacaaagcaatcctcccgcctcagcctcccaagtacctgaggcgcaccaccatgctcaggtaatttccgtattttttgtagagacgagggtttc[131 bp omitted]tatttttgagacagcatcttgcaatgttgcccaggctgtatgcagtggtgtgtacatagctcatggcagccttgacttcctgggctcaaacgatcctcccacctcagccacctgagtagctgggactacaagggcaccactacgcctaattttttaaactttttgtagagatggggggtttcgctgtattgccccagctgtcttgaactcctgacctcaagtgaacctcccacaaggacctcccaaagcactgggattaaaggtgtgagccactgtgtctggccccaatatgttcttaacatcccctcctaccaccaccagtctggaaggttctagaaggttcctaagactgggctatgtagctacaaaggtagatttgctggatgtagagattcgcagtcatttatcttccttttggaataaggagattaaactaaataacagaaaatagatggccaggcgtggtgactcaagtctgtaatcccagcactttggaaggccaaggcaggcagatcacttgcagtcagaagcatagctaccaaaaattatgaaatttagctggttttgtggcccgcacctgtaatcccagttactcaggaggctgaggcacgagaatcgcttgaacccaggaggtggaggttgcagtgagctgagatcacaccactgtcctccagcctgggcgacagagagagaccctgtctccaacaaacaaacaaataaaaagaacggaaaacattttgctcttagacaaaatgcatcacacaatccacctatcaggaggctgctcgggcctggcggcagggtcgccagccctcaccttggtcaaggtgtacgtccccagtaggttcagctccagcagctggcggaatccctgggcagaggtctcctcaggcctctgtgggggtgggtctaaagtggggggtgagagagagaggaaaagtgacgggggctggacacagttgcccacgcctgtaatcccagcactttgggaggctgaggcaggcggatcatgaggtcaggagttcaagaccaacctggctgacagggcaaaaccctgtctctacgaaaaatacaaaaattagctgggtgtggtggcgggtgcctatattcccagctactcaggaggctgaggcaggagaattgcttgaacctgggaggtgcaggttgcagtgagcctagatcgagccactgcactccagcctgggcgacagagtgagaccccatctcagaaaaaaaaaaaaaaaaaaagccgggtgcagtggctcatgcctgtaatcccagcatttggggaggccgaggtgggcagatcatctgaggtcaggagttcaagaccagcctggctaacatgatgaaccccatctctactaaaaatataaaaattagcctggcgtgctggtgggcgcctgtaatcccagctacttgggaggctgaggcaggagaatcgcttgaacccaagaggcagaggttgcagtgagctgagatcacaccactgcactccagcctggacgacagagtgcgactccatctgaaaaaaaaagaaaagaaagaagagaagagaagaaaaaagaaaagaaaagaagagagacatggccaagtgagggcacagccctggggacacacaggagggatggaacagggccacagtttcagcacaggcctggggggcttccattgctttactctcctgtccaagtggctagaaagaggtatgaggcaggatgagggaatcaggggcagggagtggggaaactgacgtgcaggaaacagagttggggggcaggaggtggagaatggccctggggtctcacaactcacggtggccagcgttgttgacaacacaatccaggcggccaaatcggcggatggtctcagaaaccagggtctgaggagaaaggaaatgtcctttgttttttttttttggagacggtgtctccctcttgtcactcaggctggagtgcattggcacgatcttggctcactgcaacttcagcctcctgcgttcaagcaactctcctacctcagcctcccaagtagctgggattacaggcgactgccaccacgcccggctaatttttgtactttttagtagagacagggattcactaggttagccaggctggtctcaaactcctgagctcaagtgatccacccgcctcagcctcccaaagtgctggaattacaggtaccacgcccagcccaggaaatgtcctttgaatgagcagtagatggggtgtccagccataaagaagacagggctcccaaatgcaaggcaggagggggaagctgaactcccaggtcaggggacaagagctagaggaagaggggactccgagatcagcagacacagcaggcaagcaggagacaggaaggagacagggggctggtcagagccacactgcagtcgtcacacccagggtcagggggtggggcaggggggtgacaaggattcagagagcgcgtaggggacagttgcccaaggggggcagataacagagagatactgattaaaaggaagaaataggaacccagaaataatggagaaaaaatcagttacatacaggccacgtgcagtggctcacacctgtaatcccaacactttgggaggctgaggtgggcggatcacctgaggtcaggagttcgagaccagcctggccaacatggtgaaaccctgtctctactaaaactacaaaaattagccagacacggtggctcatgcttgtaatcccagcactttgggaggctgaggcgggcggatcatctgaggttgggagttcgagaccagcctgaccaacatggagaaacaccgtctctactaaaaatacaaaattagccaggtgtggtggcacatgcctgaaatctcagctactcgggaggctgagagaggagaatcacttgaagctgggaggcagaggttgcggtgagccgagatcacaccattgcactccagcctgggcaacaggagcgaaactctgtcttaaaaaaaaaaaaaattagccgggcatggtggcgcacacctgtaatcccagctactcgggaggctgagataggagaatggcttgaactcggtaggctgaggttgcagtgagccgagatcacaccactgcactccagcctcagtgacacttacaaaaaaaagagacagaaaaatcagttccagttgacccactttgagggacttattcatttccatccacatgttaaatgtgctaagagccttggagaggtgtgacagaaggaacatgtgacctgcccatcagtcacagaagaccttgtgtgtggagtgacactgggtggaaacctttgacgagtccagcggagccaggagaggaaggaaaagtagagggaaaggcatatgcaaatggctggaggagaacaaagaactggtcattagcggagatgggggtaggaacaggaactcggcttaccttcacatcatcttcctgagtcacatcacagaggataaagacagctccagggagctcctgctccagggcccggcccccagactctgcagggagagaagagctgggagcctggacccctgggtctcagggaggaggggttggggacttggactcctgggtctgagggaggaggtgctgggggcctggactcctgggtctgagggaggaggggctgaggtctggactcctgggtctgaggaagtagggcctgggggcctggactcctgggtctgagggaggaagggctgggagcctggactcctgggtccgaggaagtagggcctgggggcctggactcctgggtctgagggaggaagggctgggagcctggactcctgggtccgaggaagtagggcctgggggcctggactcctgggtctgagggaggaagggctgggagcctggactcctgggtctgagggaggaggggctgggagcctggactcctgggtctgagggaggaggggctgggagcctggactcctgggtctgagggaggaggggctgggggcctggactcctgggtctgagggaggaggggctgaggtctggactcctgggtccgaggaagtagggcctgggggcctggactcctgggtctgagggaggaagggctgggagcctggactcctgggtctgagggaggaggggctgggggcctggactcctgggtctgagggaggaggggctgaggtctggactcctgggtccgaggaagtagggcctgggggcctggactcctgggtctgagggaggaggtgctgggagcctggactcctgggtctgagggaggaggggctgggggcctggactcctgggtctgagggaggaggggctgaggtctggactcctgggtccgaggaagtagggcctgggggcctggactcctgggtctgagggaggaggtgctgggagcctggactcctgggtctgagggaggaggggctgggggcctggactcctgggtctgagggaggaggggatgggggcctggactcctgggtctgagggaggaggggctgggagcctggactcctgggtctgagggaggaggggctgaggtctggactcctgggtctgagaaagtagggcctgggggcctggactcctgggtctgagggaggaggtgccagagcctggactcctgggtctgagggaagaggggctgggagcctggacccctgggtctgaaggaggaggggttggggacttggattcctgggtctgagggaggaggtgccggagcctggacttctgggtctgagggaggaggggctggggacctggactcctgggtctgagggcagaggggctgggggcctggactcctaggtctgagggaggaggggctgaggtctggactcctgggtctgaggaagtagggcctgggggcctggactccggggtctgagggaggaggtgctaggggtctggacctctgggtctgagggaggaagggccaaggtgagggctgagggaccgtcactcaccatccttgtcgcagataaccactcgggccccgctgttcactgagaataggaagggaacaggttactctccgagccttggttaaagcctctgccgccctcttgtggccacctggattggggctgatctccctctcccctcgtgaccccagtctcatgatcacccataggacagagggcagacgccttgacacatactctccttgccttgtttctgctgaggctcctgaacccccgttcgtggcttccggagcaaactccacgactgacagagccattcctcaaaccactggttttgtagctacaccaacagacccagagaaaggggccactgccttcggagaccctgccagactcagccctagcctacagcgccacacgcttactttagcctgcaaattggcttttataatatcagaatcctggctgcagtactggagtccctattttccgcccccatcaccccgcccccatccttcctttctcacactccacagctcccagcagtcagacccggctcaccgaaggcgcgcacgatcccagctccgatgccgcgcccgcccccggtcacgaccaccaccttcccggcatagcgcgttcccgtagccatcccgtgtacgtcggtctctctctctctctactctgggcctctttcacctccaaagccccgtgaggccgtcgcatcaaatcctcaatagaggctggatcctggaagtccggcctcggggggcgttgccaggaaggctagagacctggaagtttgtccccagcccctcctccctcagacactcctctcttcccacagacccaggaatccaggagccccagtccctcctcccacagacccaggaatccagaagcctcagtccctcctccctcagactcgggagtccaggcccccagcccctcctccctcagactcgggagtccagcctcccagcccctcctccctcagacccgggagtccagcctcccagcccctcctccctcagacccaggagtcagggtcccagcccctcctccctcagacccgggagtccagcctcccagtccctcctccctcagacccaggagtcagggtcccaccccttcctccctcagacccgggaatcctggcccagccccctccactctcagaccgagggatcaggttctctatcccttcttcccagagacctataagtccaagccccctgtcccttcctctctcaggacccaggagtccacgactccagctctgcccctcagagacaccagtgccacaaccccagacagacagaaagaaagctattgactaaaagttcaaagttttaatccaaatttagacagtgttgagaaaaccaaactttggccatagaaaccattcccctcccgggcccgcaatggggaccagaccacgccccctgatgccctgagtggtcccagatctccggcggtacctccagaccacgtcctcgcgctccgattggctgccgcttttgggcggattagaagctggattgtagcagagtgactcgcagaggccatgccccctcgtcttgtggcaggaccggaggggcgatcccggcatcccacgcgggcccccagggggtgggacctcctccacgcccactccctcggcgagagaaccccgtggaacccgaattagccaccgggggagatctggggggaggggtctcctggcgcgtggggtccgaaggaggcagcggcacaccgggaagagggtctccctgggagtccaaatttccacctggagaggatgagtgggacatgagaatggcaaacctcagcgctaggaccccggattcccagcccctcctccctcagacccaggactccggattcccagcccctcctccatcagacccaggagtccaggcccccagcccctcctccctcagacccaggagtccaggcccccagcccctcctccctcagatccaggagtctggatacgccagtccagtcctctttgagactcagttgtcggccctctccccgccccctgacctcttcctcccctcctcccaagtgtcccggaccccagtcacctcttgcctgagacctaaaactcccaaaccctgcccaactctttactcaccaagataaaaaattctcaccggcccccagacccctcctctccaggacctgggattccaggtctccagctctctcctccctaaaacccagaagtccaacatccccagccagtcacctgtcatcattctgtgccactgcgacgcctcagtagccagggcttgggagaggctgagaacccgctcccggtgaccttcggaagtcggcaagtaaggggtggtgttccttggactagaaaaaaaaagaagattgggggtgggggtgtgtacatgggggagaggtgggggatggttaattggtacaaaaagaaaaggatgaataagacctactattagatagcacaacagaatgactatagtcaataataatttaattgtacatttttaaataaattaaagggtgtaactagattgtttatacatcaaagggtaaatccttgaaaggggatggataccctattcccgatgatgtgcttatttcacattgcctgcctgtatcaaaacatctcaattatctcgtaaatatatgtatacctagtatgtaccaacaaaaattaaaaattaaaaaaaaaaaaaaaaaagcaggccaggtgcgacagcttatccctgtaatcccagcaccttgggaggccgaggcgggcggatcacttgaggtcaggagttcgagaccaccctggccaacatggtgaaacccagtctctaccaaaaaatacaaaaaagttagccaggcatggtggtgggtgcctgtaattccagctactagggaggctgaggaaggagaatcatttgaacccagaaggcggaggttgcagtgaactgagatcacgccattgcactccagcctgggagacagagcaagactccgtctcaaaaaaaaaaaaaaagtaaaaaataaaaataaaaataaaaaataaacagctggcacagtggggacccgggtaccgcacgtgcctttctgggagttgtagttcctagcacgtgtctctaaaatacgttaaacatggcaccgccctcataccgcccacatgcattacgggatttgtagtccactcgcgcgtcactatcacccaatttccttgatgcagaagtaggatctgctattgaccaagggaatttgaggaactaaagatatcactacggatctagggctttctggttttgttgcagatgccccgggaacttaagcatctctagaagggttgcgatttgtacttccatattcaggagactttaataataatgctactcccctttgcttttgcaaatttttttttcctgctcccttgatacgccctccagttccttacctactccaggacccagagcttctgagccatttctgggctcccgagtgtcctacgacaggctggaaaggaattggggcattagaactcctcacctggaagccccacgttctcattttgagggtgaagtgaagggggctccaaaagagaatgaaattgcccaaaaacactggcaatgttttgttttgtttttcctatgcttctgtaggcactgaatttttaaaaattaatttattttatttattcattttttagaaaggatggagtacagtggtgtgatcataactcactgtagtctcgacttcccaggcttggactaatcctgcttcagcctcctgagtaaatagaactacaggctcgcaccaccatgcctggctaattatttttatttttatttttagtagagacagagtcttgctatgttgcccaggctggtctcttactcctgcctcggcctcccaaagtactggtattacaggggtgagccatagcacccagtgactgacaatgtttaactttacctgtgttcctataaagcagcacatgagttcagaaatcccacctccaccaccaccacctgtgactt[216 bp omitted]aggctaaggcaggagaatcgtttgaacctgggagacaggggtcgcagtgagtcgagattccaccactatactccatcatgggcaacaaagggagactctgtctcaaaaaaagaaaaaaaaaatctaaggggaggttaggtgcagtagctcacacctatattcttagcacctccttccaaggcaggaggatcacttgagctcaggagctcgacaccagcctggccaacgtggtaaaaatctgtctctactaaaaatacaaaaattggctggatgtagtggcatatccctgtagtcctagctactcgggaggctgaggcatgaaaatcacttgaacccaggaggtggaggttgcagtgagtggagatcgcaccactgcactctagcctgggcgaccttgtccctgaaaaaaaaagaaaacatcttttttttttttttttttgagacagagtttcactcttgttgctcaagctggagtgcaatggcaaaatcttagctcaccacaacctccacctcctgggttcaagcgattctcctgcctcagcctcccaaggagctgggattacagacatgtgctaccatgcccagctaattttctatttttagtagagacggggtttctccatgttggtcaggctggtcttgaactcccgacctcaggtgatccgccctccttggcctcccaaattgctgggattacaggcgtgagccaccatgcccggccgaaaaaggaaaacgtctaaggggaaaccatcctgagatatctgagacactctgatgttcagatctgggacgttcttcctattgaaagggcatgaataaaatcaattttcttcctggcttacattttcttttttgctttcttgctattgacaacacatagcaactgagaagaaaaactaggcttccaatccagatgtgtgacccccgcccccacccactgtcctcccctcactgccactcctgtccacccaccactatccaggcgaggaagctgactctagcacaagtacaaactggggtaaattcggaaatccagtttggaggaaggaggtagtgattatctccattttacagaaagggactcaaagtaggcgaagaggacctactaccaccccaccgcccagccccagccctcctcccctcaccctttgctccacgtcaggctggcgtctggctggggacagtgtccttcccagggtgagaagccggggggaggtcgggcgagggaagggccgtccacattcctggtttctgcgcatccgctccagctgctcctgggcactcatccggggccgggccaccggggcctagggaggcgagaaacgtcccaagacccaacctttaggccaggcacagtggctcgtgtaatcccagcacttttgggaggctgagtagagaggatcacttgaggtcaggagttgaagaccagcctggccaacttggcgaaataccatctctactaaaaatacaaaaattagctgggcgtggtggcaggcacctgtaatcctaattactcaggaggctgaggcaggagaattgtttgaaccccagaggtggaggttgcagtgagccgagatcacgccactgcactccagctgcacaacagagcaagactctgtctcaaatatatatatatatatatgttgcttaaacaaggagagagggagaaggccgggtgcagtggtgggtgactgtaatcccagagctttgggaggctgaggtgggaggatcacttgcggccaagagtttgagaccagcctgggcaacatagcaagaccccatctctacaaaaaataaacttgttagatgtggtggtggatgcctgtcagctactcaagaggctgaggcagggggatcacttaagcccaggagttcaaggcttcagggagctatgatcgtgccactgcacctcactctgggtgacagggcaagatcccgtatctaaaagtaaaaagtaaagacagagagagcactcattgctgaagcttccagttaaacatcccagtgagatagcatggatctgtgcttattgtagaaccagtccctgcagtttcctctgctttgaccaatcctgagtcctgtttatataa[135 bp omitted]ccgcctcctgggttcaagcacttctctgcctcggcctctcaagtagctgggattgagtaggtggcacccgccaccacgcccagctaatttttttgtatttttagtacagacagggtt[145 bp omitted]aaagcttggtagcagcacactcagatttctacacatccaattgttttaaacatagtcttaataagcaggtatttttagctatgcagtctgcctgctttgtataccctgaaactgtgcccaacatctgctacccatagataagatgagccccaagcccctgctgctctttggacctctctgatccagagaaacctccacatgctggtggctggcatcacccagaagtaagccccttctccagtccctttctcttgggagctcccttgccttcctcccttcctgtgcagtggtcctcaccctcacacagtaacctctggagggtctcacactgggtgtgactcccccatagacaaatctgtcagtgtccaccaaataaagctcctgtgtgctactgccatctggtggtcatagctttttctttgctaaaccctgaaatccctggaactcactagaccacccctgtgctctggaccttggcagcccctgaaaccacccggttggggtgagggaggagcatgtcccaagataagtgatgttcccagcaggctccaatcatccatgcccatgacacaccactgagaatcaaaaagtgcctctcctctcttcctaggaaaggctcgattgcttttgtatccatgataacaagtaagcacaagaaatgccttcttttttttaaattattttattttattttattttatttttgagatggagtttcactcttattgcccaggctggagtgcaatggcacgatcttggctcactgcaacctctgcctcccaggttcaagcgattctcctgcctcagcctcccgagtagctgggattacaggcatgtgccaccacgcctggctaatttttttgtatttttagtagagacggggttacactatgttggtcaggctggtttcgaactcctgaccttgtgatccgcctaccttggcctcccaaagtgctgggattacaggcgttagccaccgcacgcggtcttttttcttttttttttttaaagacatggtttccctctgttgcccaggatggagtgcagtggtgcaatcatggctcagtgcaggcttgacctcctggactcaagcaatcctcacgtctcaacctcccaagcagctgggaccacaggtgggcaccaccacgcacagctaactttttattttttatttttttattttttgagatggagtcttgctctgtcacccaggctggagtgcagtggcgcagtatcagctcactgcaatctcagccacccaggttcaagcgattctcctgtctcagcctcctaagtagctgggattacaggtgcgtgctgctacacccggctaatttttgtatttttagtagagatgggtttttgccacgttggccagggtgctcttgaactcctgacctcaggtgatccacccgcctcggcatcccaaagtgctgggattacaggtgtgagccactgcacctggccacagctaactttttattatttttttgtagagatgggtcttgctacgttagccaggctgctcttgaacgcctggactcaactgatccacctaccttggcctctcaaagtgttgggattacaggcatgagccaataccactggccaagaaatgccttatttattttattattattattattattattattattattattattattattattattttcgagacagagtctcgctctgttgcccaggctggagtgcaacggtgcaatcttgggtctttgccacctctgcctcctgggttcaagcgattctcctgcctcagcctcccaagtagctgggattacaggcacccgccatcacgctcggataatttttgtatttttgtagagacagggttttc[132 bp omitted]aagtaatcccaacaggtaccccaaagacttctgaaagccagccaatcagtgatggagccaagcttctgaaaatcagccaatcagtgatggtcacatgcttctgagggctggccaatcagtgatggatccgtacttctgaaaatcagccaatcattgatagctccatgcttctgaaaaccagccaatcagcaacagacacagagcacagagcttccacagcttaaagtcaaccaattcctaaacattcctgccactagaagtcaaccagtttct[133 bp omitted]ctgcaacctctgcctcccgagttcaagcgattctcctgcctcagcctcccgagtggctgggattacaggcgcccaccaccacgcctggctaatttttgtactttt[133 bp omitted]ggttctgctattagccccattttagagaagaaaaaatgaaggcacagagaggtttaataactgacccaaagtcacacagcttagaagcgacagagacaaaaatcaatctcaatgctcttaacaagcagtgctctctctgctctgagtatggccttagaacgctctactcctagctgtttcccagaagtgtgggggtccctgatggtcagatgcaaggattacaggatggacctacagcttaccttggttcctagctgtggggaagggaggtggcgaccctcagggctggaagcccgggagaccctcggagacccaagacctggaaagacagaacgggacttggtgaggacgggaatttccgtaaagtcccacccaaccaggatgctcacctaagtgagggctggcgaggtctttgtcgcctccaggaggccgcccccagtcagtctcgggggacctaggggagctcagttccaaggactctggcaggctctgcggggattagaaaagggggataatgatgatcattataataattattattattaccatgttgcaagcatttaggcattggaatacagtctgaataggattcagaccataaaccaggccgggcgcagtggctcacacctgtaatcccagcgctttgggaggccgaggcaggcagaccacctgaggagttccagaccagcttagtccaacgtagtgaaaacccgtctctactaaaaatacaaaaattagctgggcgtggtggcaggcgcctgtaatcccagctacttaggaggctgaggcagaagaatcgcttgaactcgggagttggaggttgcagtgagccgagatcgcaccactgcactccagcctgggcggcagagcaagactctgcctcaaaaaaaaaaaaaaaaaagactataaaccagatctgagcatggaggcttgtgcttgtaatctcagccctttgagaggccaaggtaggaggctcacttgaggccaggagctagacaccagctgggcaacatagcaagaccccttcccttaaaaactttttaaggctgggcgcggtggctcatgcctgtaatcccagtactttgg[136 bp omitted]ctgaggcaggagaatggtgtgaacccgggaggtagagcttgcagtgagccaagatcgagccacttgcactccagcctgagcaacagagagagactccatctcaaaaaacaaagcaaaacaaaacaaacgttttaggctgggcacagtgggttcacgtctgtaatcccagcattttaggaggccgagatgggaggatcacttgagaccaggaggtcaagaccagcctaggcaacatagggagaccccgtctctacaaaaaagttaaagaattcgccgggcatggtggcagacacctgtagtcctagctacttgggaagctgaggtgagagaatcacttaagccccagagatggaggttccagtgagctgtgatggcaccactgcactccagcctgggtgacagagcaagaccctgtctccaaaaaaacaaaaaaactgtaaaccaggagccagatgtcctggcttcaaatcccaactgtgccatttattagctgtgtgaccttcggcaagctgctttacctctctgagccatattttattttatttgagacacagtctcgctctttcagccaggctggagtacagtggtgcaatcttggttcagcttactgcaacctctgcctccctggttcaagcgattctcctgcctcagtctcccaagtagctgggattacaggtgtgcaccactgtgcctggctcattaacattttactttttgatattaggattgagtccatatatatgtggcacttagaacagtgcctggtgtctaagtgcattatatatataatcatattagggctgggtgcggtgcctcactcctgtaatcctggcgttttggaatactgagactggaggatcattttaagccaggagtttaagaccagacttggcagcaaagtgaggttccatctccacaataaacaaacaaccaaaaattagccaggcatgatggcacgagcctgcggtcccagctactcaggaagctgaagcaggaggattgcttgagcccaagaattcgaggctgcagtgagccatgatcacaccactgcagtccagcctgggcgacagaatgagatcccatcttaaaaaaaaaatcctggttgggcgaggtggctcacgcctgtaatcccaacactttgggaggccgaggcaggcggattactcaaggccaggagtacatgaccagcctggccaacaaggtgaaactccgtttctactaaaaatacaaaacttagccaggcttggttgtgggcacctgtaatcacagctacttcggaggctgaggcaggagaaccacttgaacccaggaggtggaggttgcagtgagccaagattgcaccactggactccagcctggatgacagagtgagactacgtctcaaaaaaacccccgaaaaaaaagaaaacaaaggcttccagaggttaggacacttgtaccaggtgggttagctgatcaaggaagaattaaagaggtgggtggggaatagactgagtcaaggacaggtgggacatgaagcttggggtggggaggaattatgtgcgtcttacctccctctctgaggactcctcgccctggagcacgggagatggggagtcaggctcagtgtgtgggggcggtttctgggggccacccagacctgccagcgtgtcttccaccatccacagctgctgctgagcagacactctgtcctgcagggaggaaaggaatttgttacttaaaggtgggaaaacgcaggagggtttcagctaataggcccctgcaaaggtctgaaatcagctgggctatatttatggagttgggatttattttt[224 bp omitted]gaggc[138 bp omitted]cacctgtaatcccagcattttgggaagccgaggcgggtggatcaccagaggtcagaagttcaagaccagcctggccaacatggtgaaccctcgtgtctactaaaaatacaaaaaaaaattagccgggggtggtggtgcatgcctgtgatcccagccactcgggaggctgaggcaggagaattgcttgaacccaggaggtggaggttgcagtgagctgagatcgtgccactgcactccagcctgtgcaacagagcgagacactgtctcaaaaaaaaaaaaaagaaaaagaaaaaactgtcttttctttctatgttgttttactgtgttacatctattataaataggtgaccatacgaatatgagagtctgttctttttgtttgtttttggagacagtccctccctctgtcacccaggctggcgtgcaatggcttgatcatagctcactgcatcctcgaactcttgggcttaagcgatccttccacctcagcctcctgagtaactgggaccacaggcgtgcacaaccaggcccagctaattttttcacttttatttttagtagagacagagtttcaccatgttgcccaggctagcctcaaactcctgggctcaggtgatccacctgcctcatcctcctaaagtgctgggattacaggtgtgagccactgcagctggcatgggtctgttcttgccaagtctggattgtagatctagtgggagcagcttagagtgagaagatgcatttaaaactaggcatcaatggttttttgttttttggggttgttgttgttgttttttaagatggagtctctccctatcacccaggctggagtgcagtgtcacgatctcggctcactgcaacctccgcctcccgggttcaagcgattctcctgcctcagcctcctgagtagctgggactacaggcgtgcaccagcacacccagcaaatttttctatttttagtagagacagggtttcaccatgttcgtcagattggtctccaactcctgacctcaagtgatccacctgccttggcctcccaaagtgctgggactacaggcgtgagccaacacgcccggccgtgtcaatgtttttaaagatacatgatttagaacttgatggctagatttagagtgaaaaagcaggtctgaggctaagcaatgaggtttatattttaggagcagagcttgcactaaaggaatgggttcagaactggaactccagaggataaatttaacagcaaaagtcaggatgcaggatgcaagagatgaacttgcaagatggaaaaaaggctgagggttggagttttgctggtgagagcatggcttcaacaagaggagagatttagaaccaggggagagagcagctctggatctgaagtaggtattaaaacgaaaggcattggccgggcgcagtagctcatgcctataatcccagcactttgggaggc[134 bp omitted]aggagaatcacttgaacccgggaggcagaggttgcagtgagccgagatcacaccactgcactccagcctgggcaaca[148 bp omitted]ctactaaaaatacaaaaattagctgggcatggtggcacacacctgtagtctcagctactggggaagctgcggcaggagaattgcttgagcctgggaggtggaggttgcagtgagtcgagattgtgccactgcactccagcctggcgacagagcaagactatgtctcacacacacaaaaaaagaaaataaaaaatagaagggctgtgtgcggtggctcacgcctgtaatctcagcactttgggaagctgaggcgggtggatcacctgaggtcaggagttcaagaccagccggaccaacatggagaaaccccgtctctcataaaactacaaaattagccagacatggtggtgcatgcctgtaatcccagctactcgggaggctgaggcaggagaattgcttgaacctgggaggcggatgttgcggtgaaccgagattgcaccattgcactccggtctgggcaacagaacgagactctatctcaaaaaatataataaaataaataaaataaaaataaaagagtaggccaggcacagtggctcacaccggtaatcccagaactttgggaggccgaggtgggtggatcacctgaggtcaggagttcgagaccagcctgaccaacatggtgaaacccccctctctaccgaaaatagaaaaattaaccgggcatggtggtggtcatctgtaatcccaggtacttgggaggctgagggaggagaatcgtttgaacctgggaggcggaggttgcagtgagccaagattgtgctactgcactccagcctgggcaataaagcgagactgtctcaaaaataaaaataaaaaataaaagagtataatggattgtttgtaacacaaaagataaatgcttgaggggatggacaccccattttccatgatgggattattatacattgcatgcctgtaccaaaatatcttatgcacttcataaatatattcatctg[142 bp omitted]gaaaccccgtctctactaaaaatacaaaattagctgggcgtggtggcgggcacctgtaatcccagttactcaggaggctgaggtgggtgaatcgcttgagcccgggaggcagaggttgtggtgagctgagatcgtgccattgcactccagcccgggcaacaagagtaaaactctgtccccctccccctcaaaaaaaaatgttgtaaaattatagccaactttacagcagaaattaggtctggcgcagtggctcatgcttgcaatcccagcactttgggaggccgtggcaggcagatcacttgaggtcaggagttcaagaccagcctgaccaacatgtctctactaaaaatataaaaagtagctgggcatggtggcatgtgcctgaaatcctagctacttgggaggctgaggtgggagaatcacttgaacctggaaggcagaggttgcagtgcgccaagattgcgctactgcactccagcctgggcgacagagtgagactgtcttaaaaacaaacaaataaacaactttacagcagaaattagataacagctcgagaaaacggcattcaaaattgaagcttaattaaaattttaatgagagaatttaaaaaaaaaccccaaagggcatggtcttaactaaaataaggggcttagattgaaaggacagaaaggaggctaagggtcaactgggcggggcctcgattctgtgggcgaagattaaatgctaaaaggatttccaggcagaacttggagttgggggtgggtcttggggtctccaagcagcgatttacctggggagaaccaaggtgcagcaggtactccagcgtctctcttaaggtgcccagctcctgctccaggccactgtacgtgtcccaaaccctctctcgctcctcaggttgcataaagggggagacataggttaggtccctctcccaccagatccttccccaccccatcatttgtcagctaaggaggagataagggagtttggtccctggagccctgcaggcgtatggactacaattcccatgggcctctttgcttggactactgggaaccccaaagtctgtatggaacctgcaattccagtacactgctagtgtagacaaataacagcattccctgaatccccaggattacttctgctctctcctaggtagcagagtctacagatctaatgaatttcattagacagttaaaagaccacagcacccagccagacacggtggttcaggcctttaatcccagctatttgggaggccaaggcgggcggatcacttgaggtcaggagttcgagaccaccctggccaacatggtgaaaccccgtccctactaaaaatacaaaaattagccaggaatggtggcgagggcctgtaatcccaggtattcgggaggctgaggcaggaggatcacttgaaccagggagacagaagttgcagtgagcctggatccaggcgctgcactccagcctgagcaacagagcaagaatccgtctcaaaaaaaataaccacagcacccactcaccctggggcagcagaaacttccttgccaataccaacaataacaatgataatatcagctaacacttattgggcactgatcatgtgctaggcattgttctcaactctcatttaattcctatgaggtagttactattattgtctccattttacagataataattatagctgacacttaagtattgctttaccaagtaccaagtaccttaagtgttaaatattcattcattcattcattcattcattcactcattttcacgtatcacatataataattctcagagttacttaaggccgggcgcagtggctcatgcctgtaatcccagcactttgggaggctgaggcaggctgatcacctgaggttaggagttcgagaccagcctggccaacatggcaaaaccccatctctactaaaaatacaaaaattagccaggtgtggtggcacatgcctgtaatcccagttactcaggaggctgaggttgcagtgagctgagatggcaccactgtactccagcctgggcgacagagcaagactctgtcccccccaaaaaaaaaaaaattagagtggttacaagacaatgaggagagagaaaaaataataaaatttggagtgtagacttctgaagaacgatcttcctatgagccctctggggcaggtccccttcgtaacgacttgcatagtcctggggcctcctaggagggcaggccccttcccaggtgctcacctgagtcaagtgacagagggtggccctcacactgaccagccggtcctgcaagaggcgctggcgaccccaggccctcccgggagccccagcctccctggtggcttggcccagctgttgccgggtcaactccagagctgcttctagttgctcctgcaccaagacagaaggtggttagacttcagaagccatgcctagccccaagaagaaagaaaagatgtcctttcacgtcctggacgtccagtcagcatcctgacttccgcattcaggaagggctcagggcaggcagagaggccaggcgccctgtccttggcccagggccccgcaccttctcctcctgcttctggtctatctcctcctgcagcctccgcagaagccggtcctgcccgcacaacttggtcagcagcgtctggagaaaggagagcgggagctactgatggtccagatctggctcttcccctgccgctcctcccatcatctagaacattctctccccaactctgggaactcagcaaggattagatcagtgacaacttacatctgtctccaagctttggtggaaagttgactccaggggaggacccggctgaagagaaggaaaaaagtcaggggtcaaaggggacaggctggtcattcttgtaactcagtgctgagccacgccctgtctctactgataggtactgcactatttatttatttatttatttagagatagggtcttgctctgtcacccaagctggtgtgcagtcgtgcgatcatggttcgctgcaggctcaacctcctgggctcaagcaatcctcccacttcagtctcctgagtagctgggaccacaggcgcacacatcatgcccggctaatttttgtagttttaaaatttttgttgctgttggttttggtagcgatggggttttgccatgttgcccaggctgatctcaaactcctgggctcaagcaatcctcctgcctcggcctcccaaagtgctgggattataggcatgcaccatcatatcatgcctggcctttttttttttttttttttttttttttgagtcaaggtctgtcacccaggctggggtgcagtggcatgatcatggctcactgcagccttgaactcttaggctcaaaggatcctcccacctcagcctcccaagtaggtgggacaacagatgccagccaccggtgccagctaaggttgtttgtttgtttgttttcagggctggggtctcactatgtcacccagaccagtcttgaactcctgatctcaaatgatcctcctgccttggcctcctgaagtcctgggattacaggcatgaaccaccaagcctagcgacccctctccttatcagcttccttctaagcattagcaaatttcagtagaccaacttccacattcttggcttcagaaagatcaataatgggctcttgatcaagcagccatggcaaatattataattaatggagaaatttagacattttatttatgactaagaataaaacaaagtgcagggcacagtgactcactcctgtaatcccaaagctttgggaggccaaagagggaagatcacttgagcccaggagttaaagaccagtctgggcaacatagggagaccttgtgtctgcaaaaaaaataaaaataaaaaaatagggccgggtgcggtggctcatgcctgtaatcccaacactttgggaggccgaggcgggtggatcacctgaggtcaggagttcgagaccagcctgaccaacatggtgataccctgtctctactaaaaatacaaaacttagccaggcgtagtgacgggcgcctgtaatcccagctacttgggaggctgaggaagaagaatcacttgaacccgggaggcagaggttgcagcgagccgagatcgtgccattgcactccagcccgggtgacagagtgagatttcgtctcaaataaataaataaataaataaataaataaataaaataagctgagcatggtggtacatgcctgtagtctcagctactagggaggctgaggtgggagtatcgcttgggcccaggagactgaggctgcagtgagccatgattgcaccactgcactccagcctgggtgacagagtgagactctgtctcaagaaaataaataattttttttaatttaaaaaaaaacaaaaaacagcctgggtaacatggcaaaaccctgtctctacaaaaagtagaaaaagttagctaggtggccaggcgcagtggctcatgcctgtaatcccagcattttgggaggccgaggcaggcagatcacctgaggtcgggagttcaagaccagcctgaccaacatggagaaaccctgtctttactaaaaatacaaaattagcagggcgtggtggtgggtgcctgtaatcccagctactcgggcagctgaggcaggagaatcgcttgaacccaggaggggaggttgcggtgagccgagatcacgccattgcactccagcctgggcaacaagagtgaaactccttctcaaaaaaaaaaaagaaaaaggaaggaaagaaggaaagaaagaaagagagagaaaaaggaaaggaaaggaaagaacgaggaggggagggg[359 bp omitted]gaggcaggagaattgc[263 bp omitted]caaaaaaaaaaaaaaaaaagaaagaaagaaagaaaagaaaagaaaaagaaagagaaagaaagaaagaaagaggtttttgcggatttaagttaagttacgacgatgtcatggggtgtcctaataggaggagatggacagcaacaaaaacacaaaggaagatcatcatgggatgatggaggcaaagatgtggccataaaaaaaaccacagaacctcaggaattgctggcaaccaccagaagctaagagagagtcaataaaagctcctccttagaaccttcagtggaagtatagccctgccaatcccttgactccaggcctctggcctccagaaccgcaagataatccatttctgttgttttcggccatgcgctttgttacagccaccacatgaatctaatacctacccagggtctttgaaatatctacagttctctaggcaccctaggccaagagatgacattcctcatagagaagaaaggaagggagggggctccggtagatttagggtactccaggatacctaccaataaaaccatggaggcccgggtcccagggggccgcggggggagctggagataagtgggggagccagagtgtgcctgggaggaacgttgaaatggagatgtttagaaactggcatgtctgggagacttttcattttgttctgtactaagaaaaattcttctgccttgggatcctgttgatctatgaccttacccccaaccctgtgctctctgaaacatgtgctgtgtccactcagggttaaatggattaagggcagtgcaagatgtgctttgttaaacagatgcttgaaggcagcatgctcgttaagagtcatcaccactccctaatctcaagtacccagggacacaaacactgcggaaggccgcagggtcctctgcctaggaaaaccagagacctttgttcacttgtttatctgctgaccttccctccactattgtcctatgaccctgccaaatccccctctgcgagaaacacccaagaatgatcaataaaaaaataataataataattaaaaaaaaaaagaaactggcatgtcttagtgacaaatagtagagtgggcatgtccataattgaagtgctttaggagatattttgaggttcagaactgggccctctcaacttcctcaactacctgctctccagctgtgtgccactgtggggacacagagggtgataataaatgcaccagcctggcaaaacagccccacaagatgatggaatttgctactctcattctcagacttgcagtcagctgtggatattctgagctaccgtcccatgatgctcagacaaaacagcaggcaaccaacttgcaaggtgaactggggacacaagggagatgcaaacctctcaccgcactgtcttggcacagagta[139 bp omitted]gtcaacatggtgaaacctcatctctaccaaaaatataaaaatcagccggacgtggtggcaggtgcctgtaatcctagctactcgggaggctgaggcaggagaatcgcttgaacccgggagacagaggttgtagtgagccgagatcgtgccactgccctctaaccttggcgacagagcaagacctcagtctcaaaaaaaaaaaaaaaaagcaatggccgaagaccagcctagaaagacagcccagacacctgagaggagctggacacctgataggttcaagctctctctcacctgagcccagctgagatcattatggactacaatacccatgacacccagggagcaatggccttgagaatacggaaagacagccctgaggcctgatgggaaacgtagtcccctccttctcacctctctgctcacctgtgttctgggctcctgactccagtgctggggactcctggggggctttcctcccccagcctcagagggaggtcctcggcggggagtagggggtcgggagagggtctggcgttgggggccccaatccagaggaggtcggacatcaatgcgactcaacggggtgtgaggtcgggcagggggtgctgtgtctcctgagggggcagggggtcgccgcgcaggggcagaacggggacgggggaggctcagaggcgagggagggcgagagaggggggtgaacaggctgtgggaaggagagaatcggggaactgagtcaactagagccctctccatccacctccttacccatcaagtcagcctcaaggacatgtctcacttcactgtgtcttactgtcccactgggttagaatcctcctctactgtccaaatcctcagtaatgtccgctttgtggcatcttcccctccagtcttctccccgacaggctgtgacccccacgggagccccagcaagtcacacacactcaagcagaaagcgctaaggcccgcccccaaccagtttccggccctgcccttctcttaggccacgcccacaaccatgtcctccctactcactcggggctcctcgccctccgcatctggagtccagagtggaggtcggttgtggggctgggagtgagcagcctgggtctaccacgacctctggagagtcgagtcacttccggtgattctgagatgcgcccctcttcccctctgctcacctccgggggaccaccggggccgccggggccctccccgggctggggtcgtgcaggtgacctgggttgcccactagcgagtggacatagacaagatatcactccttcgaacttcataacagccctattctcttgtcacaggtgagaacacaaggatgcacccaaaaaaggaaagttgtgcactataaatcatcgtcccccttcttcagaaggggaaactgaggcctccaatgtgaaactgacctgtgcgccaggccacaacgtctatccaggttgctggacccaatgccccggaatatgggatagactcagccaggtagtccagtttccagcctgataattggcgcaggccatgtcagagcctaagagatagtctgacatttttttaaaatctgatactatcttttacctggcattgtttaggtggcagctcaggggacttcagaaggagccaatcagagagtgtgcaatattgatcattcctggagcagagctgagtgcgtgactgaagggtcagcttgggggcggggacggacaaggtggtgggcggaacttaagggagaaagacttttgctgattggaaaagttccctggaggtggggcctagaagacgaggcgccttagctagaagactggtgattggacactcaagggggcagggccccaaaggggaggagttgggatgacgagactgactcagggtggagggtcaggagcatggcttggacctctactcactagtcgtccccctccgcacgggaggcccggcccagcgcccgtagccagccccgcaggtcttctaaggtgtcagcggccaaaacgtaggtcctcatgcccgggtgctctgcctgcgggaagagaaggcttggaatccggactcccgggccttgtaaaaaggaggacaggccggaccggtgactcattccagtaaacccagtgctttgggaggccgatgcgggaggatggcttgagaccagcctaggcaacataatgagacacccccctccacctccttccgcccccgtctctacaaaaaaatcaaaaaattagccggacgtggtggagcgcacctgtagtcccagctaccggggagactgaggcaggaagactgcactttgcgtcgctgcacgccagcctgggtgacagagcaagaccgtcaagaaagaaaggaaagagggaaagagggaagggaagggagagaaagaaagagagaaagagaaagaaagaaagagagagagagaaaaaaaaaggaaaggaaaggaaaaaggaaaggaaaggaaaggaaaatggaaaggaaaggaaaggaaaggactggacagacgcggtggctcatgcctgtaatcccagcactttgggaggctgaggtaggcggatcacctgaggccaggagtttgagaccagcctggccaacatggcgaaaccccatctctactaaaaatacaaaaaattagccaggcgtggtggcgtgcgcctgtaatcccagctactccagaggctgaggcaggagaatccgttgaacccaggaggcggaggttgcagtgagccgagatcgcaccactgcactccagcctgggtgacagagagagactctgtctcaaaaaacaacaaaacaaaaaaacaaaccaaaacaaaacaaaacgaggatgcaattgacgcttgtcaagaccttttatctccagtaatggatattccagtgcttgttaggacttggagtttcctcgacagatatctacccgccctcatctccagttcccatcgcctggtgcacaacatggatggatggactcacggtgaaggtgaagcgccgccctcggggggctcccggcccatctggtctaatattgtagctggggagcaggacgctgcctaggacactctcctcgcggctgtctgcaaagaggggctggggtcaaggatcacacagggatcagaaggccaagatgctagagagaagggcagactgggcgggggggccctcccaccccaagccagccagccagccactgacccttgtaataaaagaggcaatggccggagaggacgaaccagcggcgtttccagagacggagccccgagctgtcctggggagagagatgggaggaggggcctgagtaaagggaaacagaaaaaggggatgaaggcagtgacgatggggacagagagccagagagagaaagaaacttggagagaggagaacagagacataaagtagggatcaagagagtggggtgaggccgagcacaatggctcacgcctgtaatcccagcacttagagaggccaaggcaggtggatcactcaattccaggagtttgagaccagcttgggtaacatggcgaaaccccatctctactactaaaaaaaaaaattagccaggtgtggtggcgcgtgcctgtagccccagctactccggaggctgaggagggaggatcacttgagcctgggagtggggtggaggcacaggagaaagacccagagagacagaagagacagagacacatgtttggggcaatggagtggataagaaggagagctggaagccctctgaacatgatagaatagaatagtagccctacttcttttcttttctctctcttttttttttttttttgacagagtcttgctctgtagcttaagctggagagcagtggcatgatctcggctcacggcaacctctgcctcccaggttcaaatgattctcctgcctcagcctcccgagtaactgggattacaggcacgcaccaccacacccagctaatttttgtatttttagtagagacagggtttcactatgttggccaggctggtcttgaactcctgacctcaaatgatctacccacctcggcctcccaaagtgctggggttacaggcgtgagccactgcgtctggcctcccccactttctttttttgttttttgagatggactctcgctctgttgcccaggctggagtgcagtggcacgatctcagctcactgcaagctccgcctcccgggttcacgccattctcctgccccagcctc[226 bp omitted]tccaccttcatgttttctcgtctatccgctggagattgagaagttttagggaggtttggatgagacatggaccacatatgggcagactttagctgcagagacttagtccaattattctggagcctgagacacagagaggccaggaaggtggcaatgagccatgacccaaatgcagcgtctccacctgcctgaactactcatcgcctctgcctgaactactccactaactatctccaacctcgtgtgcctcttctcctcaacccattcccatagaagcccacatgatcttttaaaattataagttagatcacgtgagtccccttttcaaaacagagaattaagaacacttgaaattcagtctcaaattccttaccatcacttactgttttttgtttgtttgttttgttttgttttgagatggagtctcgctctgtcacccaggctggagtgcagtggcacaatctcggctgactgcaatctctgcctcccgggttcaagcgattctcctggctcagcctcctgagtagctgggactacaggtgcctgccaccatgcaggctaatttaggttttttgtttttttttttttttgagacggagtcttcgctctgtcacccaggctggagtgcagtggcatgatcttggctcgctgcaagctccacctcctgggttcacgccattctcctacctcagcctcccaagtagctgggactgcaggcgaccaccaccacgcccg[131 bp omitted]caccacgcccagcctaatttttgtatttttagtagagatggggtttcaccatattggccaggcttgtctcgaactcttgaccttgtgatccacctgcctcgacctcccgaagtgctgggattacaggcgtcagccatcgtgcccagcccatgtactgctttgcagagagttttgagtttgaaggtgcataagaatcaccaggaaggtgtgttaaaacacagattctggggccccatccccagagttcctgatttggcaaatctatgatggtacctcatcatttgcctttctagcaagtccccagatgacgctgatgctgctggtctgggaccacactttgagaaccactgctctgctgctcctcctggcttcttcccctggcctcacttgacaccaaggttttgcctgctgcagaccttttccttttggatgcgatctgcctccaggtcttttttttttttttgacatggagtctcactccatcatccaggctggagtgcaatggcgcaacctcggctcactgcaacctccacctcccagattcaaattttccttgtctcagcctcccaagtagttgggattacaggcacccccaagctggcccggctaatttttgtattttttagtagagccagggtttcgccatgttgaccaggctggtcttgaactcctgacctcaggtgatccgcccgcctcagcctcccaaagcgtttgaattaccggcatgacccactatgctcagccagctcaaatgtcacctcagagataattttccctgaccaaatgtcaaattgaagttctcctctctcagccacgttcaagcacatcatattccgtttttttgtttttgtttttgagacagggtctcactctgtcacccaggctggtgtgcagtgacatgaacacagttcactgcagcctcagcctcctgggcttcagcaatcctcctgccttagcctcccgagtagctgggactataggcgcacaccaccacgctcagctaggttttgtgtgtgtgtgtatttgttgttgagatgaggtttcttcatgttgcccaggctggtctagaattcctaagctcaagcgatcttcccgtcttggcctcccaaaatgctggggttacaccactgaacctggaccctatgttacttcttcatagcccatcctgcgatctgaaatgaccaagtccatttatttatttactaatttattatccacccatgctccacccaatctggaatgtaatataaatacttttgtgttatttgcatggtgtgtgccctgggattgggaacactgtaagtgttcaagaagtagtcaagaaagaatgaatgaatgggccaggcacggtggctcacgcctgtaatcccagcattttagggagccgaggcgggtggatcacttgaggtcgggagtttcagaccgccctggccaacatgataaaaccccatctctactaaaaatacaaatattagctaggcatgatggtgcatgcctgtaagcccagctactcgggaggctgaggcacgagaattgcttgaactggaggccagaggttgcattgagccgagatcataccactgccctccagcctgggcgacagaaagagactctgtcttaaaaataaataaataaacaaacaaacaaacaatgacggactaaggggaggggcagtgatagcaagaaaaagaaagcctatttggggacttgcaaggagagagacagaggacagccggggcacagacttcagtgtccttttccttctcctactgaccccacctgcttatgaagccagcctcggatgtgcacgggaaggttgggatccctcctgagcgcattgcctctcttcccaaaggcgtggatcttgtttactgcccgggtgggcttctgaggagagaaggggacagaagtgaacagggagagcctaggatggtcctgggagggggtgagggtggacacaggcaaccgtaggctctcgcttggctgccctgagaaatgggtcaaggaccag[180 bp omitted]gaggcaggagaatggcgagaacccgggaggaggagcttgcagtgagccgagatcgcaccactgcactccagcccgggagacagagtgagactccgtctcaaagaaaaaaaaaaaaagaaagaaagaaaagggtcaaggtgggggctgaagttggagatcagaattgggaggtgttcttattgcagagttaagagactcttttttttttgacaggctctttggagtgcagtagcctaaacactgcagcctttacctcctggactcaggtgatcctccagcctcagcctcccatgtagctgggaccacaggcatgtcccaccatgcccagctaatttttttactttttgtaggggacgggggtctcactttgttgcccaggctgggagagactctttttttctttttcttttgagacagagtctcgctctgtcccccaggctggagcacactggcaccatcttggctcactgcaacccctgcctctcgggttcaagtgattctcctgcctcagcctcctgagtagctgagattgcaggcacgtgccaccacgcctggctaatttttgtatttttagcagagacgcggtttcgccatgtcagtcaggctgctcttgaactcctgacctcaggtgatccacccgcctcagcctcttaaagtgctgggattataggcgtgagccactgcgccgggccgagactctttttttgatgggcagagggaggtgttcagaggcaaggaagaggctgtagggaagcaatttggggatcaagcatccactgccaagaagcagatgcccttggccaccagagccagagctgtagtaggtcctttgggatctgaactgggactatgggctgggagggccccataatcagggggaactctcacgctgagtctccagtgaatcaaaggatgccctggtgccctgcggtcacaccccttagcaaccaagtacaaggagaggaagcctcaaatccctccatcctgcccggatggagcctcatctcctgatgcccacagatatctcaggcatccttagccaggtcccgacaatatgcccttccttggaagcggtggtactgaccaaggctgagatcagatctctgggctctgaacttgagaaacaatatgtgtggaacggcaggaggaaaaagaaatgagtgtctccctaagcttttggctgggatgccgatttgggatgcaagtatctggaggccccttgggtcttattgtcagagaagggtctctccttataggatttcattagtgggtagattggatggcgagagataggacagcaagttctggcactaatcaagagcagccactacttctcagaactcgaggggcctcatggctggggagcggctttatcttagcaaccagggtcaagggaggttgttactctggtttagaattaggaaaatacaaagggtggggacagagctgggagtgcctctgaattcctagctgcggtgtgtaggcaatttgggaccttactatgtctggcagaccccgttgctaaggatctttgtccttaacaaccagagtccttggggaaacagaaggatgggcggcccagagccccaccttcctccccatccccgccaggaagctcaaaccttggggctcaggctgctgagcgaggagatggtggaggcgctgctggccaggctcaggctgctgcgaggtcggctcccctccatcaagggctgggggagagaaagaaaggggctgtgtctctgcagtgacgggtgtgagacagagatggggtcaggggcttggaggtcggaggaggctgcagagaaagagcctgttgtttcgggacttggggggctgggggaggccatggcccgtgaccacataccaagagtggtgccaagagaggtaggcggccctggcagctgcgggagggggcagctgtctgcagcccaggccagagaataggggcttctttattcctgcccactgcactcaggccaggaatttgaccctctctgtgcttagggactccccattccctgcctccttccggctgccccaggctacctgtctcccgccctcccacatgcacccccaaaccacccctgccaactccccaagccaagccctgcggcaccaggaatgtgaacccagagagcccctcccagcccagccagggaacttacccagctctggggtcccagtgacgggggggcaagaggacggtgtgggtgctgcggcacctaggcagtctcccgcctcctttgtctcttagctgctgtctctcatagttctcaatctctctcctcacctgctcactcacactttttgtctctttgtctcctgtctcttacggtctctctctctctctcttccttttacactacctctctccccactctcactttctgtgtctccctctgatctctgtctcttccagtctctctctcactcattctctccctctctctctctctccaatctttctgtttctgtccaaatcttttattgtcagactcacagggtctcttccttaagtctctgtctcattctctctctctctctctctctgtctctcagtcatcccctgtgtcctctctccttcacactcagtctcttcctctttctctctggctctgccgtttcctcccttttctctttccgatttcccttctcactttctcccttcctccctctcccagtttctctttcctctctgctggtctttccctgcctctgccagccgcccacgctgctgttctcccctcccaatcccggctgtccccgccccttctggcctccccactacagcctgacctctggctcagctgcccccatagctgaagggaggggcttgggccccccaattcccaggtcccctaaggaccaaggttgggacttctcagtgtttggagagttggacttgaggcctgcactccagggcccccgtgggtttgctgctgtggttgggggcctgagccactggtgtcctaaacggaggaggcttgtgtcctgcaaggggtggggactcaaatttccaaagccctggagggaatgggttagggatccagactcctgggtgcccgagaaggtctgagctaggatcaggactcctgagtcgtgaaagagctgggggtctggaaacatggctgtgcttggaaggggccagggacggtttgtccaggtcccctagggagaaaaggggatggtcccagtagggcagggtgaaatggagagttccaaacctccacctcagatccaggtgagaattctcttctagactgaggacaactccctcaggagagagacatgattccttggtatattttgaggaacaagattatgcatccgtaggcaggggaggagagcggggggctggaactgtcacccagggcctggaacttgtagcagaagcgcccccacccgcacaaagagtgccacccaggcagaatcgcggcttgtgggggcagagctactgcctaagtctgaagcagatgacacccaggagtggagccttgtgcctgtgaccgggaaggaatctgagctttcggtttaactgccattcaccatgcacctgttgagcacctactgtgtgcaggcac[136 bp omitted]atagcgagaccttgtctctatttagaaaatgaatttcttttttttttttttttgaggcggtgttttgctctgtcgccaggctggagtgcagtggcgtgatctcggctcactgcaacctccgcctcccgggttcaagcgattctcctgactcagcctcctgagtagctggaactacaggcacatgccactgcacccggcctaaattaattattattattatttttttgagacggagtctcgctctgtcgcccaggctggagtacagtggcacgatctcagctcactgcaagctctgcctcccaggttcacgccattctcctgcctcagcctcccgagtagctgggactacaggtgcccaccaccacgcccggctaatttattttgtatttttagtggaggcggggtttcaccgtgttagccaggatggtcttgatctcctgacctcatgatccacctgcctcagcgtcccaaagtgctaggattacaggcgtgagccaccgcgctcagcctaattacttttttttgaaaagcattgagcccagcaaagtgcctgatctcatagtgcttacatcctcattctcatttgcaaggaatctggaccctgctgtgactatcttggtcaagtggcttcatttccaagcctgtttccccatctgtgaaatgggaacaatgacaccctcgcactcggggaggaaaccaaccacatgtgaaaataggagactctagccaggcgtggtggcaagctcctgtactcccaactactcaggaggctgaggcaggagaattgcttgaacccgggaggcggaggttgcagtgagccaagatcatgccattgcactccagcctgggtgacagagtgagacaccgtctcaaaaaaaaaaaaaaaaaaagaaagaaaaagaaaaaagaaagaaaagaaaaaaaaaagaaaatgggagactctaggctggggcctgtgggctaaattggggtaggaggccaggcacagtggatcacaactgtaattccagcactttgggaagccaaggcgggcagatcacct[143 bp omitted]tctactaagaatacaaaaaaaattagccgggcgtggtggtgggcacctgtagtcccagctactagggaggctgaggcaggagaatggcgagaaccagggaggaggagcttgcagtgagccaagatcgtgccactgcactccagcctgggcgacagagcaagactccgtctcaaaaaaaaaaaaaaaaaaaaagacctgcctggtcaacatggcgaaacactgtctctactaaaaatacaaaaattacccaggcattgtggcacatgcctgtaatcccagctactccagaggctcaggcaggagaatcgctggaacccaggaggtggaggttgcagtgaaccgagatggcgccactgaactccagcctgggcgacagagtgagacgcctactcaaaaaataaataggctgggtgcagtagctcacgcctataatcctaacactttgggaagccgaggcaggcagactgcctgagctcaggagttcgagaacagcctgggcaacatggcgaaacactgtctctactaaaaatacaaaaaattagctgagtgtggtagtgcgtgcctgtaatcccagctactcggaggctgaagagggagaatcgcttgaacccggaagatggaggttgcagtgagccgagatcacgccattgcactccagcctcggtgacagagcgagactccatctcaaaaaaaaataaaaaaataaaaaataacaaataaataaataggcctggagtggtggctcacgcctgcaatcccagcactttgggaggccaaggcaggcagaacacctgaggtcaggagttcgagaccagcctagcaaacatggtgaaatcccgtctca[133 bp omitted]atggagaaactacgtctctactaaacaaatacaaaattagccgggcgtggcggcacatgcctgcaatcccagcactttgggaggccaaggcgggaggatcccctgacgtcgggagttccagaccagcctgaccaacatggagaaactacgtctctactaaacaaatacaaaattagccgggcgtggcggcacatgcctgcaatcccagatactcgggatgctgaggcaggagaatcgcttgaaccccgaaggcggaggttgcggtgagccgagatcgcccctttgcattccagcctgagcaacaagagcaaaactccgcctcaaaataactaactaaataaataaataaattggggtgggaaggcattgaccctgagctgagagagaactggctcgctgttgaagcagggccacgcatttgattgacagttcgtttgttggaggggcgtggtcacgctcggaaactccgccgtgacgttgcaaaagctggaatctccgcgagaagtcctgtcttacttccacttcccacccttcgggttgcggtctcgaaaccccgcctctcttcgtgacgtcagcacgccgggcgcggtaggctataaaagcctagtggccattgtgttcgttgctcttatcggttcccatcccagttgttgatcttatgcaagacgctgcacgaccccgcgcccgcttgtcgccacggcacttgaggcagccggagatactctgagttactcggagcccgacgcctgagggtgagatgaacgcgctggcctccctaaccgtccggacctgtgatcgcttctggcagaccgaaccggcgctcctgcccccggggtgacgcgcagctcccagccggtgagtaaggggtcggaacgcctgggtccccacggggctgggggcccggatttagaaaggagaaggggttgggagcctggagtcctgagcctgagggaggagggatctggaagccagattcttgggtcccccgtgaaggaatcatctgccaagtagggggtcgggtcagaatgtttcagtctgcgagggaggagggtgtgagggtttgatttgtcaatcttcagcagaatgagagagctagggactatgactttgtcgccaagggaagcaagtaaagacttttgttcttggttcttgggactgggagttctgcgtctgaagaaagagagggctgggggcttggacccttggatctaaggcagaactaggggctcagactcctggctattgagagataagaacagagccaagggacagagatgggcgtggccgagatcagaaaggaatttgggactctcgcgttgctatttacaatagttgtgttactatttccgttgctatgactcatagtcacgcccggatgccatcctctaaatggcccctaaactttatttttttctcccccttttccagcccagacacatggccccaggccaagcaccccatcaggctaccccgtggagggatgcccaccctttcttcctcctgtccccagtgatgggcctcctcagccgcgcctggagccgcctgaggggcctgggacctctagagccctggctggtggaagcagtaaaaggagcagctctggtagaagctggcctggagggagaagctaggactcctctggcaatcccccataccccttggggcagacgccctgaagaggaggctgaagacagtggaggccctggagaggacagagaaacactggggctgaaaaccagcagttcccttcctgaagcctggggacttttggatgatgatgatggcatgtatggtgagcgagaggcaaccagtgtccctagagggcagggaagtcaatttgcagatggccagcgtgctcccctgtctcccagccttctgataaggacactgcaaggttctgataagaacccaggggaggagaaagccgaggaagagggagttgctgaagaggagggagttaacaagttctcttatccaccatcacaccgggagtgttgtccagccgtggaggaggaggacgatgaagaagctgtaaagaaagaagctcacagaacctctacttctgccttgtctccaggatccaagcccagcacttgggtgtcttgcccaggggaggaagagaatcaagccacggaggataaaagaacagaaagaagtaaaggagccaggaagacctccgtgtccccccgatcttcaggctccgaccccaggtcctgggagtatcgttcaggagaggcgtccgaggagaaggaggaaaaggcacacaaagaaactgggaaaggagaagctgccccagggccgcaatcctcagccccagcccagaggccccagctcaagtcctggtggtgccaacccagtgatgaagaggagggtgaggtcaaggctttgggggcagctgagaaggatggagaagctgagtgtcctccctgcatccccccaccaagtgccttcctgaaggcctgggtgtattggccaggagaggacacagaggaagaggaagatgaggaagaagatgaggacagtgactctggatcagatgaggaagagggagaagctgaggcttcctcttccactcctgctacaggtgtcttcttgaagtcctgggtctatcagccaggagaggacacagaggaggaggaagatgaggacagtgatacaggatcagccgaggatgaaagagaagctgagacttctgcttccacaccccctgcaagtgctttcttgaaggcctgggtgtatcggccaggagaggacacggaggaggaggaagatgaggatgtggatagtgaggataaggaagatgattcagaagcagccttgggagaagctgagtcagacccacatccctcccacccggaccagagggcccacttcaggggctggggatatcgacctggaaaagagacagaggaagaggaagctgctgaggactggggagaagctgagccctgccccttccgagtggccatctatgtacctggagagaagccaccgcctccctgggctcctcctaggctgcccctccgactgcaaaggcggctcaagcgcccagaaacccctactcatgatccggaccctgagactcccctaaaggccagaaaggtaggtgctgagagcccagattctattttttttttttttttaattgagttggagtcttgggctgtcacccaggctggagtgcagcggcatgatcttggctcactgccaacctctgccgcccaagttcaggcgattctcgtgcctcagcctccagagtatctgggattacaggcgcatgacaccacacccagctaattttttttgtatttttagtagagacgggggttttgccatg[133 bp omitted]gctgggggccgagacttctgggtccctgtatgttgcagagggttgcatgtcatctccatggagaaggctgtgtacgctgtcacgcaatcccttgtaagaggccaggcccctgggggaggagggagcagctgtggctcacagcagccccaggaaaccacctcttccttcagtgagtcagatagatagagaatcccgtgacagtgacaggcaagtgactagccagatagaaagcatttttgtgtaataactaatttttgtttgcttctctctctctcttccccgccctccccatccggattcccgtggctgtgtgcatctcctgcctgtgtccccatgtctgcccgcaggtgcgcttctccgagaaggtcactgtccatttcctggctgtctgggcagggccggcccaggccgcccgccagggcccctgggagcagcttgctcgggatcgcagccgcttcgcacgccgcatcacccaggcccaggaggagctgagcccctgcctcacccctgctgcccgggccagagcctgggcacgcctcaggaacccacctttagcccccatccctgccctcacccagaccttgccttcctcctctgtcccttcgtccccagtccagaccacgcccttgagccaagctgtggccacaccttcccgctcgtctgctgctgcagcggctgccctggacctcagtgggaggcgtggctgagaccaactggtttgcctataatttattaactatttattttttctaagtgtgggtttatataaggaataaagccttttgatttgtagcgagcagcgtctgtatgtgtcagaaactgacagcattctacttacaggtccctgagggagctgggaagagaatagcataaaacaaagcacttcaatggcggataaaccgcttttcctcaaatttgctaccactcatcctgaggcttcttttgaacctaacagtgcagggaccagccccacagggtcggtgggcttctccctgtgtgcggcgacgagagagtgtagaaataaagatacaagacaaagagataaaagaaaagacagctgggcccgggggattactaccaccaatgcgcggagaccagtagtggccccgaatgtctggctgcgctgatatttactggatacaaagcaaaaggggcagggtaaggagtgtgagtcatctccaatgattgataaggtcacacgagtcacgtttccaccggacagggggcccctccctgtttggcagcccaggtggagagagagaggagacagcttatgccattatttctgcatttcagagacttttagtacttttactgattttgctactgctatctagagggcagagccaggtgcacagagtggaacaggaaagtgaaacaggagcgtgaccgctgaagcacagcatcacagggagccggttaggcctccggataactgtgggccagcttgactaatgtcaggccctccacaagaggtagaggagcagagtcttctctaaactcccgcagggaaagggagactccctttcctggtccgctaagtagcgggtgtttttccttgacactgaggctaccgctagaccatggtccacttggcaacgggcgtcttcccagatgctggcgttaccgctagaccaaggagcccttctgctggccctgtccgggcataacagaagcctcgcactcttgtcttgtggtcacttctcactatgtctcctcagctcctatctctgtatggcctggtttttcctaggttatgattatagagcgaggattattataatattgggataaagagtaattgctacaaactaatgattaatgatattcatatataatcatatctaagatctatatctggtataattattcttgttttatattttattatactggaacagctcatgtcctcggtctcttgcctcggcacctgggtgtcttgccgcccacataacagctggtgggttttatagttttttttgttgctttttttgagactgagtctcgctctgttgcccaggctgaagtgcagtggtgcaatctcagctcaccacaacctctgcctcccaggttcaagtgattctcctgcttcagcctcccgagtagctgggactagaggtgtgcgccaccacgcctggctaatttttgtatttttagtagagacagggtttcactatgttggccaggctggtctcaaactcctgaccttgtgatccacctgccttggcctcccaaaatgctgagataacaggcgtgagccaatgcacccggcctatgtatttttgtttgtttgtttgagatggagtctcgctgtgtcacccaggctggaatgcggtggcacgatctctgcttactgcaacctccgcctcctgggttcaagcgattctcctgtctt[226 bp omitted]ttgggacaattatcaccacccccccaagggagctggagaattgagtcacggatccctaaaaggaggcagaattgtctgtgccttgctggaccattaaggctcaatctctacaggcctttacattctcctccgttgctttgataccagtgggtatcgaggtccccaagcccgggtgggacctccccctcagccagtgttcaggctcttgacacagtcatgaaaatgaattcaaggacgagttggaaaagagtgaaaatacaggatttattgcaaaggggaaagtccacactcatgaaaggggactcgagagaatcacgtgcaaggggggttgaggctgctaccgttatgggttttttgtttgtttgtttgttttttaaagatggagtcttgttctgtccagcccaggctggagtgtagtgacacgatctcagctcactgcaacctccacctcctgggttcaaacaattctcctaccttagcttcccaagcagctgggactgcaggcgccaccacacctggctaattttttgtatttttagtagagacagggtttctccatgttggccaggctggtctcaaagtcctgacctcaagtgatccacctgcctcagcctctcaaagtgctgggattacagacgtgagccaccacgctggccctttttggatttttttaaccaaggggtaaaatactcatgagcattcctggaaaaagatggagatttctcagaactgtggtgccacccatctttacaccaaatatgggtgttcctgggaccgtcatgatgctggtgggtgtgtgactgtgttgatgaacatataatgaggtcctacgtgaaaccgaggtcagacccagtgccatattgggtctagtcggacttagcctacttggcccacgccctggtttttcaggatcttatcagcccatagcttctgtagctatttcaagtttcctgttgctggtctggtcttgtgaaactgctgcctggaattttctaatctcctgcaaccaccctgtatgattgctgttgcagcctgattttacatttataagccctgtgtccataggcctagtttccttatctgtaagctgactaacaattgtacatatcttatgggattgtaaggccccaaaggagttaaaacaatgctcatgaaataaatgctataatacggtaattattctatataccgttattcttttttttttttttttttttttcctgatacggagtctcactctgctgcccaggctggggtgcagtggtgggctctcggctcactgcaacctccacttcccaggttaaaacaattctcctggatcagcctcccaagaagctgggactacaggtgtgcgccaccacttccagctaattttttttttttttatggagtttcactcttgttacacaggctggagtgcaatggcacgatctcagcacaccagcaacctccgcctcctgggttcaagcgattctcctgcctcagcctcctgagcagttgggattacaggcgtgagccatcacgcccagctaagttttgtatttttagtagagaaggagtttcaccatgttggtggtcaggagtttgagactcctgacctcatgatccgcccacctcagtctcccaaaatgctgggattatgggcatgagccactatgcccacctctacctctaatttttaatttttttttttttttttgagaccgagtctctctgtgtcacccaggctggagtgcagtggcgtgatctcggctcactacaaccccctgggttcaagcaattctcctgcctcggcctccctagtacctgggattatatgcgtgcgctaccacgcagggctaatttttgtattaatctacctctagaccttcacagaatgcaggctcctctcatcctcctaacctaatggcctttcattagctttacaaaagcagcttagttaaactagaaatcctagcactttgggtggccgaggtagatggatcacttgaggtcaggtttttgtttgtttgtttgttttgtttgtttattttgaggcagagtcttgctctgtcgcccaggctggagtgcaatggcaggatcttggctccctgcaacctccgcctcccgagttcaagtgattctcctgcctc[133 bp omitted]ctcctgccatataatcctttcatttccccaaggcaaccaagcctaattccacctaattaaaaacctttgtatgagtgctacctgctgcctgaggatcccaaccctgaggcctcttgctcagctagttgctcctgattcttcagatgtagtgtgaaaattcctttttttggtggggggatagagtcgcattctgttgcccaggctggagtgcagtggcacgatcgggtcactgcaacctccgcttcccagattcaagcaattctcgtgcctcggccaccggagtagctgggattacaggcatgcgccaccatgcccagctaatttttgtatttttagtagagacggggtttgccatatcggcgaggctggtctcgaactcctgacctcaagtgatccttccgcc[134 bp omitted]gattcaagtgtttcttctgcctcagtctcctgaatagctgggattacaggtgcctgccaccacgcccagctaatttttgtacttttagtagagacggggtttcacatgttggccaggctggtctcgatctcctgacttcaggtgatgcaccagcttcagcctgccaaagtgttgggattacaggcgtgagccaccttgcccggtcagtgttggttattaaggtggtgcaaaagaaggcatgtcggggcccttcctccaaatgaggaggcacagaagctggcaagggtatggtattttattgagttattcaacagccagcttctaattgaaactggacaagcagatgctgaaggcctggagcgggctaaatggaaagcagaagtccatggtgaatgtgtctgggcccactcggccgaactggagcaccagatgttcttctgagaagtgaatcaggaacaaagccttagcctgactctctcatctcccagcttcgagaactgagactttttttttttttttttcttttttttttttttttgagacagagtcttgctctgtcgcccaggctggagtgcagtgacctgatcttggctcactgcaacctccacctcccaggttcaagcagttcttctgcctcagcctcccaagtagctaggattacaggcatgtgccaccacgtccggctaatttttttttttttttttttttttgagatggagtctcgctctgttgcccaggctggagagcagtggcgcgatctcggctcactgcaagctccgcctcccgggttcacaccattctcctgcctcagcctcctgattagctgggactacaggtgaccaccactacacccagctaattttttctgtgtttttagtagagacgg[135 bp omitted]tttcaccatgttggccaggctgttcttgaactcctgacctcagatgatccacccacctcggtctcccaaagtgctaggattataagcgggagctaccgcgccaggccgagaatggagacttttaagaggctgagcggtgcccttactaagccagaaaccctgagggtgtgtaaactacaattcccaataggctttgcaatagggtggcatctgccctgcctagaaaaacgctcaagtgatgatgggagatgtagttcccttccgttcacaccctaacccccaccccacctggcccggctaaactggtttccaggagctcacggtgtttgggatccacgatttggaagttcttcaccgaagcccgagtgactcgaccatggaaattgagcgtgtagacaccgttctccttgtcccacgacggggttttgttgtgcaacaaaagcaacccttgtttgtccccacgttggtaacgactcagtagcgactcctgttcctagaaggtaaagaaggggctgtggttttctcagaggctttcgaaactccatcttgaacaggggcgactccatcttgaacaggggcgactccatcttgaacaggggctgggtaaaatgaggatgagacctgctgggctgcgttcccaggaggttaggcattcttagtcacaggatgagacaggagtttgacaggactggtatcacaatgttagaaatgcttgttccccggtgcagtaaagaaatagcacttgagcataaatttaatttcctcagcaaggccattttttaactttctgcagaaagggtacactcaccaggagttttgccatgagagtacactgaacaaaggagacagggtcatttataacctggcgcatccaccctactgccgtgtagggtttccattggctggaacgggacctcacgttctgtatttgtcccaattggctagcaacttagaactttttaaaagagggaaaagcagaagaatacaaagtaaggaggaagtaacttgtggaatgttgagaaaggtaaaaacaccttcaaataaggaagaggaacaggctatgacctaatgcttgcttggaccggtacaagcatgccagggcaaatatttagggtaaattgtgggagctaaaaacgtaaagtacactgatttctttattatggctaacagatatttaagaatgtta[181 bp omitted]gcatggtagcgggcgcctgtagtcccagctactcaggaggc[137 bp omitted]gaagcaggaaccctcagttctgggaattgcccacccctttcccagaaaattaatgaataatccacctcgtttagcatataatcaagaaataaccataaaaatagccaaccagctggcctcaaggctgctttgcctatggagtagccattcttttatttcttctctaataaacttgctttcacttgactctacggactggccccaaattctttcttgcctgagatccaagaaccctctcttggagtctggatcagacccctttttggtaagtttgttaacctaccatcaaaccttttttctccagatgcaaatgttttgagtctctagtcttttactccctgagacatggaaggctaacaaagtccttcaggcttcatgtgacacctgcaacccactggcctcctcttcctcctcttcttcttcctcctctgggatctaggaggaccggccccagccccttctccattgacccagagattcctgatgtcagggactcacatttagtggctggacattgattcgctggttctggctgttggttcctgggagaatcacagtcattttccgaggccccaggtatcctaagacgttgggctcctgggggtattacattccagttggcctggttccttcttctgactatcctaccccattctctcatccccaggacactcacataacacacagcccccagctcctgtctgatccgggcagtattcctggttaaatgctcccggtcaggattcaccccattgtcaaagatggtgaacttggtgctgaagacattggatctgctccaggaagggaatggatagaataaaaatactaagtgttactctttgagtaagtgtcactcatcgcatcgactcttcccatcaatcccctatgtctaagactatgtccgaatgtctaagaatcatgttcctggctgggcacaggggctcacacctgtaatcccagcacttcaggaggcagaggcaggaggatagcttgagcctgggcaaaatggcaaaactccttctctacaaaaaatagaaaaattagttgggcgtggcagtttgtgtctatggtcccagctctcaagaggctgaggtgggaggatcacctgagccccagaggtcaagcctccaatgagccgtgatcttgccactgcactccagcctgggtgacagaatgaaaccctgtctctaaataaatatataaataaataaaaataaataattaaataaatgaggccgggtacggtggctcacacctgtaatcccagcactttgggaggccaaggcgggtggatcatctgtggttgggagttcaagaccagcctgacagacatggagaaaccccgtctctactaaaaatacaaaattagccaggcgtggtggtgcatgcctgtaatcccagctactcaggaggctgaggcaggagaattgcttgaacctgggaggcggaggttgtagtgagccgagattacgccatcgcactccagcctgggcaacaaaagtgaaactctgtctcaataataataataataattaaataaatgaaacaaccatgtttccagcatccatggtcccaggccccctcatttcttgggtgagccatgtactttatgtagcctccctattttatttaaagggccctttaggaaccctcttttttttttttttttttttttttttctgttgcccaagctggagtgcagtggctcaatcttagcttaccaagacctctgcctcctgggatcaagtgattctcctgcatcagcctcccaagtagctgggattacaggttcacgccactatgcctggctaatttttgtatttttggtagagacggggtttcaccatgttggccaggctggtctcaagctcctgacctcaagtgatcctcccgcctctgcctcccaaagtgctgagattataggcgtgagccacctcgccactccctctacctttttggatgcaataattcacacattccaggcctcttttcccacagaaagttaggaatcccagtcccttgcctgtcaaggagtcaaatgccttaaatgccagcctacgttccaaacccttcagttcttctggtccctgagcaggtggaaggtatgctctgtggcctgctgggaaatggagtccccctgtccctaagctccctgctacctgctcctcaccacatgtcagagctctacccacctgactttgcccacgaaattgtccccgtcccgagataggtgtgtaggatccagggagatgaggtaattagaagttttgctccttcttctctttcgcccagccaggaggaagcgctatggatgagaggaacagtccattagaatggacttctggatgctgggtgtggtggctcatgcctgtaatccctgcactttgggaggctgcggcgggcagatcacttgaggacaggagttcgagaccagcctggccaacatggtgaaaccccgtctctactaaaaataaaaaaaattagccaggcgtggtagtgcgtgcctatagtcccagctagtagggaggctaaggcaggagaattgcttgaacccagggggcagaggttgcagtgagctgagatcgcaccactgcactccagcctgggcaatagactgagactccatctcaaaacaaaaataaaaaataatgaaagaaaaatggacttctggaagctggttagagccaggggtccaaagacaaggaaacgtcatgtcccatgatagaggagccagtgatggcacaacaagcttctcaagacttactgggaggccgggcacagtggctcatgcctgtaatcccagcactttgggaggcc[134 bp omitted]gagacaggagaatagcgtgaacctgggaggcggagcttgcagtgagccgagatcgcgccactgcactgggcgacagagcaagactacgtctcaaaaaaaaaaaaaaaagacttactgggaaatgtggttctcactgagggaagccatcagctgggtcctgaatggaagcttcctatcttaatatctcctcctcattccttctgcctatgggtccagagttgaagcttagcccaggaagggtctggctttggagaatggggagcaccctcacttgcaatattgcagcaggactttggtaggcgtttcaccaagaaaaatgggtttggttggctctgagtagggcaaaaaacctctttctagggggagagaggataccccgaggagaggagaccatacttgcagggtaaaggccagaaagactagattgagagaagtggggcttggatctggaaagacaaaccaggggagggacctggttgctgggggcaggatttatctcaggattgagtgaggcctgatagcttatagcaagaaaggctcagtgagggagggtccagactatttttttttttttgacacaagatctccacctcctggactcaagccattttccctcagcctcagcctcccaagtagctgggactacaggtgggcaccaccaggcctggctaattttttttttttttttgtagagacagggttccaccttgctgcccaagctgatctggaacttgtcagctcaaatgatccacctgccttggcctccaaaatgctgagattacaagcgtgaaccaccgtgcccggccttttttttttttttttgagatggagtttcgctctttcacccaggctggagtgcagtggtgtgagatctcagctcattgcaacctccgccttcgagtttcaagcattctcctgcctcagcctcctgagtagctgggattacaggcgcccacaaccacgcctggctaacttttgtattttttagtagagacgatgtttcgccttgttggccaggctggtctcgaactcctgaccttgtgatctgcacgcctcggcctcccaaagtgctaggattacaagtgtgagccaccgcgcccagcccttttttttttttttttttttttttttttttttatgcagagtctaactctgtcgcccaggctggagtgcagtagcgtgatcacatctcactgcagccttgaactcccaggctcaagcaatcctctcacctcagcctcccgagtagcttggactacaggcacataccaccatgcccaaccaattttgtattttttgtaaagacggggttttgccatgttgttcaggctggtcttttttgtgtttgttggttggttttttgttttttgagatggagtcttcctctgtcgcctaggctggagtgcagtgatgcaatctcggctcactgcaacctccgcttcccaggttcaagcgattctcctgtctcagcctcctgagtagctgggactacaggcgcctgccaccactcccggctaatttttgtatttttagtggagacggggtttcaccatattggtcaggctggtcttgaactccggacctcaggtgatccacccgcttcagcctcccaaagtgctgggattataggcgtgagccactgtgcccagccccaggctggtcttgacctagctcagaaaggagtgggattttgcctgggaggtgggggcttactcccaaagctgttgggctggcttactgcacctgcaggctgtcagaggtctccaggtagaggtagtagagggggaacaagcccttgtccacgccgtgcttgtcacgggtgaggtagcactgcatcatggtgcccgggagcgctggccgcagcacgtaggcttccatgtcctcctccagcccagggcagggggagcggattgccaaggaggcttcgtgcctcatatggtcgctgtccgtgccaccctcgcctttcagggccttggacaactcttcgttgtgtgctgctgaggagttcgtccctgtagactcagaggcctctctcttcttttccaagtcttcttcctagcccaggcaccaaatttaaagtcgagggacaaccaccggcccagccttgcttactactgattgaccatcccagccctagggtcccgcccttgcccatccacattttctgcttattggtcaaaaatctcattcagtccacccagtcacgccctcctctgttgactggccagtctattcgctttcctctgcagccacacgcattccacctgctgattggaaaattcctttctgaaagcaaggcccattccgttaaaatggctgttagtttgatctagataacataatacagcccagatctaccctcaagagaaaccatctactgcactttcaccaacaccaaagtgagtgccagttggcccttttcttttattttttaagacagagtttcgctctgtcgcccaggctggagtgcagtgactcgatctcggttcactgcaacctctgcctcccaggttcaagcaattctcctgcctcagcctcccaagtagctaggattacaggctttcgccaccacgcccagctaatttttgtatttttagtagagacggggcttcaccaagttggccaagctggtctggaactcctgacctcaggtgatctgcctgcctcggccttccaaagtgctgggattacaggcgtgagtcaccgttcctggcctgcaactggcccttttcgatcagtgttctgccctttctgaagctcgctgtctttccatggctgcacctatttttttttttttttggacagtctcactctgtctcccgggctggagtgcaatctcagctcactgcaacctccgcctcccaggttcaagtgattctcctgcctcagcctcctgagtagttgggattactggcgtgcgccaccacacctggctaatttttgtattttactagagacagggtttcaccacg[137 bp omitted]tgatttgatgaatggtacacacacacacatgcacgcacgcacgcacgcacgcacacacacaagtctctgccagcttaatcaccaccaggaaaaagagcttctgattgggtggcagaattttagccccaccctcaccagaggtccgaggctagccctcttcttccaatatcctgagtgattgtgcattttcctaccttttggaaggccaagttttcatatacacagtcaccatccattccagggtttggtcccatattgggtgacttgtgtgcatctcccatatcctgggagtcactctcaccctctgcacgggtccctaatgtggggaaaagcaagagagatcagattgttactgtgtctgtgtagaaagaagtagacataggagactccattttgttctgtactaagacaaattcttctgccttgggatgctgttaatctataaccttacccccaaccccgtgctctctgaaacatgtgctgtgtccactcagggttaaatggattaagggcggtgcaagatgtgctttgttaaacagatgcttgaaggcagcatgctcctaaagagtcatcaccactccctaatctcaagtacccagggacacaaacaccgcggaagggcgcagggacctctgcctaggaaagccaggtattgtccaagatttctccccatgtgatagtctgaaatatggcctcgtgggaagggaaagacctgaccgtcccccagcccgacacccgtaaagggtctgtgctgaggaggattagtataagaggaaggcatgcctcttgcagttgagacaagaggaaggcatctgtctcctgcccgtccctgggcaatggaatgtctcggtataaaacccgattgtacgttccatctactgagatagggaaaaaccgccttcgggctggaggtgggacatgcgggcagcaatactgctttgtaaagcattgagatgtttatgtgtatgcatatctaaaagcacagcacttgattctttaccttgtctatgatgcaaagacctttgttcacgtgtttgtctgctgaccctctccccactattgtcttgtgaccctgacacatccccctctcggagaaacacccacaaatgatcaataaatactaagggaactcagaggctggcgggatcctccatatgctgaacgctggttccctgggtccccttatttctttctctatactttgtctctgtgtctttttcttttccaagtctctcgttccacctaacgaacccacaggtgtggaggggcaacccaccccttcacctaaaggatgaaagaagcctggactaagctcaggacagctggatcccaggagtgtgggacaccatcatcagtgctagccagagatggccagaactcctgggttctcagtccctactcatgactcagcgccctcacttgcaacaacctcctcctcctccaggtgcacggaagtctacaagggccagagtttctgattaccctggatctaaggacagggaggggttagggtctttccttttccttatctcagacaaagcatcacagagactgaagatggggggatggagtttggggtgataataattctgtcattgaaatcattggccatctcatgaaaataaaaggaaacgtcaccacaatggaatattataagggaataaaaaggaatgaag[225 bp omitted]gggaggctgaggcaggagaatggtgtgaacccgggaggcggagcttgcagtgagccgagattgtgccactgcactccagcctgggcaacagggcgagactccgtctcaaaaaaaaaaaaaaaatttgttaggtgggccaggggcggtggctcatgcctgtaatcccagcactttgggaggcggaggtgggcggatcacgaggtcagtagttcaaaatcagcctggccaacatagtgaaaccggtctctactaaaaatacaaaaattagcagggcgtggcagcgtgcacctgcagttccagctactcaggaggctgaggcaggagaatcgcttaaacccagccaggcagaggttgcagtgagccgagatcgtgccactgcgctccagcctgaagggggcctgcccctccacacccgtgggtatttctcgcaaggtggagacgagcggctgagagaagaaagaagacacagagacaaagtatagaggaagaaaagtgggcccaggggaccagtgctccgcaagtgaggacccgcaccagcgctgatctctgagttccctcagtatttattgatcactatctttactatcttggtgaggggaatttggtgtgactatagggtgatggtggggagagggtcagcaggaaaacatgtgaacaaaagactctgtgtcataaataagtttaaggaaaggtgctgtgcctggatgtgcacataggctggatttatgtttaactttacataaacatcccagtgcagtaaagagcagtattgccgccatgatgtctcgcctccagccataaggtggttttctcctatctcagaatagaatgtatggtcggttttacactgagtcattccatttccagagacgtgcaggagacagatgcctccttcttatcttaaccgcatggaggcctttctctctcactaatcctcctcagcacagaccctttacgggtgtcgggctgggggaccgtcaggtctttcccttcccacgaggccatatctcaggctgtctcagtcggggaaatcctggacaatgcccaggcttccttgggcaggggtccctgcagccttccacagtgtgttatgtttctggttaatagagaatggagaatggcaatgactttcacaaagcatactgcctgcaaaaccatttttaccaaagcacatcctgcccagccctaaatcccttaaaacttgagtcaatataacacatgtttctgtgagcacagggttgggacaagagttgcagattaacagcatctcaaagcagaacagtttttctttttttttttgggggggg[137 bp omitted]aaccggctaattttttgtattttc[148 bp omitted]tatgtcttcctttttctacatagacaaagtaacgatctgatctctctttcttttccccacacagcctaggtgacagagtgagactccgtctcaaaaaaaaaaaaaatcattaggtgaatgaggtgaatgaagacacacggtggctcacacccgtaatcccagcactttgggaagccaaggtgagaggatcacttgagcccaggagttcaagaccagcct[139 bp omitted]aaccctgtctctactaaaaaacacaaaaaattagccgagcatggtggcacgcgcctgtaaccccagctactcgggaggctgaggcaggagaatcgcttgaacccagaaggcagaggttgcagtgagctgagatcgcgccattgcattccagcctgggagacagagcaagactctgcctcaagaaaaaaaaaaaaaaaggaattgaagaaagaagccacatacaaaagaccacatatgtatacgattccatttgtgtgaaatgtacagaatagccaaatctaagaagacagtggaggttggtggttgccaagggctggggtaaatggaaaaggggtgactgctaattgatgcactatttctttctttcttttttttttccttgagacaaagtctcgctctttcaccctggctggaatgcagtagcctgatctcagtttactgcaacctctgtctcctgggttcaagcaattcttccacctcagcctccccagcagctaggattacaggtgcatgccaccacgcccagctaatttttgtatttttagtagagactgggtttcaccatg[139 bp omitted]attgattgtggtgacggttgcagaattatataaatatagttagcttctcgtatcctacaggctccacatccccactgctgacccaaaatattcaggaaagaaattgaaaaacaacaagatgacaataaataacagaaccaattttttttttctttgagacagagtattgctctgtcacccaggctggagtacagtggcatgatctcggctcactgcaacctcggcctcctgggttcaagtgactctcttgccttggcctccggagtatctgggattacaagcctgcacccccttgcctggctaatttttgtatttttagtagagacatggtttcgtcacgttggccaggctcgtctcaaattcctggactgaagtgaccaaccagcctcagcctcccaaagtgctggaattacaggcactttatttttaaaaatttttttaaataacatataacagctatttacgggccaggcatgatggtttatgcctgtaatcccagcactttgggaggctgaggtgggtggatcatgaggtcaggagtttaagaccagtccggccagcatggtgaaaccccatctttactaaaaatacaaaaattagctgggcgtggtgatgcgcacctgtagtcccagctacttgggaggctgaggcaggagaatagcttgaacctaggaggcggaggttgcagtgagccaagatcacgccactgcactccagcctaggcgacagagtgagactccctcccaacaacaacagcaacaaatatttacattgcatttatactgtattaggtattataagttatctagagatgacttacagtatatggggggatgttcatagtttatatgcaaattttacaccattttatataagggactttggcgtctgcggatcttggtatctgtggggttcctggaacacatcacctgcagataccgaggggcgaccgtgtactggaaaccatggaattgtgaactttaaatgggtgacttgtatggtttgtgaattatacttcagtgaagctgctgcctaagaaaggggaagatttgctgcatgaaccaggagatcccaggtttcaccccaatgtcccctaaattaccaggtcgttggtgggcttgccaacccttgcgtcggattctcggagactgtttaaaaggtgggggagagacggaaccattctccacggagacttcctccaattctgcatcggaattgtctgggagccaggataagaaaggggactggagaccgagattcctgaacactgaggaaggaaggaggggagagttggatttctggatgctgcaggaggaggcggctcaggacctgaactccttggtgtgaggaaggagtgggtgcggtcctgagctcctgagtattttggacagatggattgaggcaccagactcctgggttttagtggggacggagttctggggtctaggaggtcggtggactcgcaaatacctgcttctgtccgcggtgtcgggaggccgcgctcgcccctgccgtctccaccacagctcacggtgcccagggcactgtggatgccagagggcagatgtgcctctgacactttcttccggaggaaagggttcccaaggcctgggagaaggttcagcgagcccatgaaaacgatctacaaattccggtcctcaac[142 bp omitted]gaaacaccgtctctactaaaaacacaaaattagccgggcttggtggcgcatgcctgtaatcacagctactcgggaggctgaggcaggagaatcgcttgaacccgggagacggaggttgcggtgagccgatatcctgccattgtactccagctttggcaacaagagctaaactccgtctcaaaaaagaaaaaaaaatcaccctgtttcgcggaccgcccaaaccttgagacccaggtcccaaactgcatcctaagcctcaaacaagcacagccctgccgctggattgttgcgggctccgcacgtaaagaatctcgcgccaggctctcgtaatgagaccgcgccccgccccggacccctagaccccgtctccgcaatcccgggtttggggtgggggtcccggctttcccaggctccaccaccgagctctgccaagcccaatcatcacattctcttgcccctttcccctgctagttgtaccatgccccgcccctgcgctctgtagccctgccccgaacccctccctcacaggtcctgccgcggggggcccccacaagcctctcccctgggcgcccacaggccctgttctaaagctctcctgggccaaggcccgcccccatccactgccaagtccccaccctaaggctccaccccttcatccactaggccccgcccacagactcccacaggcccctcccctccaggcgaacgcccccaggggtctttggtcacctctgtcacctaaaaggcgctcctcccgcagacaagagcgccaaagccacggggaagcgtcaggattggcctgaaccatgaggagctcctggcgcttctgtcgctgcttcttttcaaacagccgccgctggggagatgggagaggtgggtgtccgggacaggaaccagatgggaagacagaagtgaggtggggcctggggcaagggctcgcatcggcgcgagagttcgtgaaccccttcctccactggggcccacacgtccaggccctcagttcttcagcagctcctcccttattccaccgttggactcagatccaagagtcctgacaccctgtcctctcatcccccaggacccaggagtcctgccttctagaagccttgttccttagaaattcatcacaagggtttgtttgcttctttagaacccccaattcctattttcttttctttttcctttcttactttttttttttctttttgagacagagtctggctctatcgcccaggctggagtgcagtaccacgatctccgctcactgcagcctccgcctcccggattcaaacgattctcctgcctcagcctcccgagtagctgggattacaggcgcctgccaccacacctggctaattttttgtgtgttagtagagacggggtttcgccgtgttggccaggcttgtcttgaactcctgacctcaagtgatccgcccacctcagcatcccaaagtgctgtgattacagccgtgagctgccctgcccggccccaaattcctattttctcatttctcagtgggaaaactcaaggatgagagacagccaacacgggctgggagtcctagagcaagacctggtggagaggcccctggggaggcacagaaggcggaagagttggagtggtgagattcctgggcacaatacctgctgttccagcttctgcagcctcatagcagcgagctcatgccccaggatgctgagagagacacaggcccatggtgacagtgcacagggaacctcggttgcccaagagagtccctccttcccccatcctgcccctatctcagcttgggttctgggcacctgtgaggtcacaggaggtgcagaacctgagcctgctccaccagttatagggccctttctcctggcactggcccacagaagccgggacccagagatcccaggtccctcctgtctcaggattcaggagtctggggcccccaaccccttctctttcagacccagaagtctgcaccctagccccatcccttcaggacacaggagtccaggtccccagccccttcctgcaaggccgatggtgctgaacctgcaaacatggttatgaagccagagccgagtgcacggggtccccagccctttccacctccacccctacccatctgtttccctactcactctctcatcaatgtgtcattatcctgagacattctgcagaagcaagaatgaggagtcaggatcagaaccaacatcccaatggatcctgcccaccagcacctaatctttagccttatttatttatttatttatttatttatttatgtatttagagacagctgagcctcgctctgtcgcccaggctgcagtgcagtggcgccatctcggccactgcaacctccacctcctgggttcaagcgattctcctgcctcagcctcccgagtagctgggactacaggcgtccgctattctgcctaatttttttgtattttagtagataccggttttcactatgttggccaggctggtgccggactcctgacctcaggtgatctgcccgccttggccttccaaagtgctaggattacaggcatgagccacagtgcccggcctgatccttacctttaaatttgcttccggacccaggcagcccgaatcccagcacccactcctgtcgggatctagtagcctgtttccagcttcccacgggggtccgcaagtccgcttctctctcccccaaatatctaattctccagcacccaggcatcagaactcaggactgtgcacttcaaacacccagcccccagcggcctagaactccactgcccacctgcctgggatccgggagacttgttctcctcaccaggtgcctggagaggctgctcacattgatgcctcggtaccttgcctctctggccaatctctaaacatacctgatcctctctttggaagctggggacctaatctcgggatatctgcgaaatagggaggagaagaaagacggctcagagggagggaggattccctctgggacctgaactggtccactcccttctgaccctccactctccacttccaacaaagtaacgaactcggtcactgatgcagccaggcaaccctgctccgggggttctga[148 bp omitted]cccgtctctactaaaaaaaaatatatatatatacacaaaaaaattagccgggcgttgtggcgggcgggcgcctgtagtcccagctactcgggaggctgaggcaggagaatggcgtgaacccgggaggcggagctcgcagtgagctgagatcgcgccactgcactccagcctgtgtgacagaggtagacaccgtctcaaaaaaaaaaaaaaaaagagagagagagagcgggagaccagagacctcgcgg[264 bp omitted]gcttcctgagtagctgggattacaggcatgcgcaaccacgcctggctaatttgtatttttagtggaggcgaggtttctccatgttggccaggctggtctcaaacccttgacctcaggtgatctgcctgcctcagcctcccaaagtgctgggattacaggagtgaacccccaagcccggcttgacatccgtctctttaaaaaacaacaacaacaaagtgtgagaagtgtgaaagacagaacgttaaaaaaaaaaaaaggctaaaaaagaattaaagatttaaatatttgtattaaaaatttaaaaaatatacattagccaggcatggtagtgtggcctgtggtcccatctacttgggaggctgacgcgggaggattgcttgggcctgggaggtagaggctgcagtgagaagtgattgcgccactgcactccaacctgggtgacagagcaaaccctgtctcgaataataagaagaagaagaaagaaactcataagaaaggctatgcaattgctaccgcgctataacttccaggcacttcgtggggcgaaaataaatgggaaaactacagctcccatgaggcgaaggggccacgatgcccgcggaagttatttttcccccggccggcagggagttgtagttatctttgaaagccttctctctcttttggcataggcgggaaatgtggcgtcaagaggctgggattccgagaaagaagcgaggctttcacgaaaatgcgagcggcttcggcaaggggcggggccgctggacgtggatgaaagctacagagccagcgtggaccaatcagacctctttggggcggggcctctgtggataagtgggcgtggtctaggggggaagtcaccaagaacgcaccggaggtccttgcccgccctggaaaacgccctctgcggtgaaggagaggtgagaggccagggttcccatactcttgggtcctagggaggatgggggccagagggctggaaaactgggtcccggaggaggatgcactgggtgccagtactttaggtcctgggaaaagaggaggctgggaccctggactcttgggtctgggggaggaggcggccgagatcccggattcctgagtgtgagagaggagcgtgttgggagccaggacccctgggtctgagggcccagactcctgtgtcggaggaagggaaggccggaggcctggaatcctggggcctgggtaacaaaatgcttgtgtcttgattcttggaagtgggggcggcgctgggggcccgaactcctggttccaggggaggaagaggcttgggacagacattatgcattatccagccctccatcccccacagaccacactgccatgcctccctctgggccccgaggaaccctccttctgttgccgctgctgctgctgctcctgcttcgcgccgtgctggctgtccccctggagcgaggggcgcccaacaaggaggagacccctgcgactgagagtcccgtgagtggccctgccctgctatccagccaggtgtttgcagtggtactacagctcctgcagaccccggtgcccgtagggcggatgctccagtgacttcctggccctacagttgtagcttgttttttgcccaccattcctcccagcagcaggggtttgacttggtgaaaaactggaggtccctgactctgaggtgtggaaaatctgcatcacgccccaactaaacgtctgtttttttaagattctctccacccaagaaggaatttgaaaacaaacaaacaaaactacatttcccagtagcaccatgttgctagttcccagtagcagttgatgttggctagctggggtattctgacttcatggtgctcttgggagttgtagtttaaattacagaagggcgggtgaactgcttgtttattaattcctacatgtgtttatcaaacccaataaaagctttggtcttaagggatttggaactttggagatcctgaaggtcagtgagtgtcttgtggtccgaatcttcctatagctccccataaggataggctggtcaggccaggcgcagtggctcatgcctgtaatcctagcactttgggaggccgagacaggcggatcacttgaggtcaggagttcaagaccagcctggccaacatggcaaaaccccatctctaccaaaaatgcagaaattagctgggcgtggtggctcacgcctataatcccagctactctgggaggctgaggcacgaattctcgtgctggaaccaagagaggtggaggttgcagtgagccaaggtcacgccattgcactccagcctgggcaacagagctgagactctgttttctgagactgtctcaaaaaacaaagaatgggctagtcattaccccctggaacggatcattgcatgttcctggtccccacgctgcaagttaggcctctattctgtgaaatccttgcagacccaggaaggctttgttgagtcccatttcttttcttccattccacatgtttcctgagcaccttctatgagccgggcatagtgttgcctatgtgttgcatagttgttagggcccagccatgtgcatgccccatgcccatggactatccctgctcactgggagatggaagacaaagggcagggctctatgagagtgaacaccaggggtgacagtcagggaggaagggaggcgtgagttgagttctttctttctttctcgctctgtcaccaggctggagtgcagtggtgcaatcttggctcactgcaacctctgcctcccaggttcaggtgattctcctgcctcagcctcccgagtagctgggactacaggcgcacaccaccacgcccatctaatttttgtatttttagtagagacggagtttcaccatgttggccaggatggtctcgatctcttgacctcttgatctgcctgcctcggcctcccaaagtggtgggattacaggcatgagccacctcattttttcttttcctttttcttttttttttttttttttatttttgctgtgtcacccaagctggagtgcagtggtgcaatcactgcaatctccatctcccagactcaagcgatcctcctgcctcagcctctggagtagctgggactgcaggcatgtgccaccatgcctagctaattttttttgtatttttgatagagacagggtgtcattatactgcccaggctagtctcgaactcctgagttcaagtgatttgcccgcctcggcctcccaaagtgctgggataataggtgtgagccactgagttctgaactggagagatatgttaagtcaagagcaaggaagagaggaagtgaggggaagagcattccaggcagagggaacagcatgagcaaaggccacttggtaggagaaagcagagcaagttgaggacgtcaaggaggctgctgtggctggagcagggagagtgagagggaggggagagggggattatgtggatcatgtgggatcttgtgagactaggtaaagaggtaaagaatgtatatatatatatatatgtttaatagacagggtcttgtgctggtgcccaggctgaagcgcagtggcaggatcatacctcactgcagccttgaactcctgggctcaagtgatcctcctacctcagcctcccaaagcactgggattacaggcatgagctaccatgcctggccttctctcttttgtaattttatttatttattttttccaacttatcttatttgcttttcaccacaactctgggaggcagaggatatattgcctattttataaatagtaagagcatagaaggcccagggagagtaaagtcccacccagctacgcatgacgggggtgggactaggaggcctgggacttttgtctgtgttgttcacagtgcctggcatatgataggggcctggtgaatgtttgttgaatgaatgaatgcatgcatgggcgggtgggtagatggatgggcagttggatggatgggcgggtggatggatgggtgggtggatgagtggatggatggatggatgggtggttggatggatgggcgggtggatggatgggcgggtggatggatgggtgggtggatgagtggatggatggatgggtgggtggatggatcgatgggtgggtggatggatggatgagtggatggatgggcgggtggatggatgggtgggtggatgagtggatggatggatggacgggtggttggatggatgggcgggtggatggatgggtgggtggatgagtggatggatggatgggtgggtggatggatggatgggtgggtggatggatggatgagtggatggatgggcgggtggatggatgggtgggtggatgagtggatggatggatggatagatggatggatggatggataggtgggtggatggatgggcaggtggatgagtggatggatggatggatgagtggatggatggatggatggatggatgggtgggtggatggatggatgggtggatggatggatggatgggtgggtgggtggatggatggatgagtggatggatgggtggatggatggatggatgatgggtggatagatgggtgggtaggatgtatgtatggatgggtgggtgggatgtatggatggatgggtgggtggatgcatggatgaatgggtggatgcatggatggatggatggttggatggatggataaaagtatgattcacagcttcccaacaagtcatgtccactctgagcacccactctgggcagtattgggctgggtgttcactgatgtgattttcatttcatctttgctgcatatgtgggaaaaggtaaaaactgagtcccttgtcagctgccccagggagcaggccatagcagtaacaggagtgagggtggggatggggatgggagcaggggctgctatgtctgtccttgttgcctcaggacacaggcctgtactaccaccggtacctccaggaggtcatcgatgtactggagacggatgggcatttccgagagaagctgcaggctgccaatgcggaggacatcaaggtgcggctgggggagtgggggctgtgggaggggtacgtgctgggagggcagagttcaggggaggactggtttctttttttttttttttgagacggagtcttgctctgtcacccaggctggagtgcgatggtgcgatctcagctcactgcacctccaccccgcaggttcaagcagttctcctgcctc[134 bp omitted]gcttcccaaagtgttgggattacaggcatgagccaccatgcctgaccatactggtttcttcaaaggggccacatggctccagctgtgcctgtatttgaaaatcaccaaagtaagactcagggagaagttgcttcttggggtcacaagctgggaagagctttggggaacacagaatacgtgtttagtgcagagtcccgtgggcaggctttcagtcgcagctccgccgcttaccagctatggggcctcccctcaccgtgcctcagtttccccacctgtaaaatgggagacatcatagaacctgctgcacagttcggatttggattttccaagggaaggattttggggtttggattttccaaaggaagatgtgtaaagggtttggaagagcatggtgacactccttagcaagtgttgtgggagggctgcgtcaacagaatgctcctatggtgccttctacagaggaagaattcaaaataagggaggtgctggtgtcccttacatcaccatgaactcccatatcaggcctctaggagcaccatcattgtccccatttcactgagtaggacactgaaccctcgtatcaggatctgtccttctcatggacctgggtctcaccaccatgcacggctaattttgtattgtttctagag[131 bp omitted]gggcagcacaggtgggcagggccttgaatgccaggctgacgggctgggagctgtccttcctggagactctgaggagctgggggactataagcagggaaggggcagtataagactggggcatgagaaagcttataagaagcttccagagaagacagagagcaggcccccaggctgaccagggtctcctctcctgtcagagcgggaagctgagccgagagctggactttgtcagccaccacgtccgcaccaagctggatgagctcaagcgacaggaggtgtcacggctgcggatgctgctcaaggccaagatggacgccgagcaggatcccagtgagcaggggcagggcgggagggacaggcagggaggggtggggaagggtggcctcactcccggcctccaggtggttgtgtgctaggcaggtgaggcctccctccccgctgcgaaatgtgctgaaatgtgcgtgggagattgccccagtgttcctcccagcatgatttaatattaacattacaatgttgtttgtttatattctgtttccatttgttgtttttaaaaatctttatcatgggctgggcacagtggcccacggctgtaatcccagtactttgggaggctgaggcaagcaggtcacctgaggtcgggaattggagactatctggccaacatggtgaaaccccatatctgctaaaaatactaaattagccgggcatggtggtgcacgcctgtaatcctagctgctcaggaggctaaggcaggagaattggttgaacccgggaggcggaggttgtagtgagccgagatcgcaccattgcactccagcctggacaacagagtgaaactctgactcaaaaaaaaaaaaaaaaaattgtcatttaaaattctggtagaggccgggtgcagtggctcacgcctgcaattccaacactttttgaggcaggagaatcactcgagcccagaagttcaaaaccagcctgggcaacatagcaagacccctgtctctataaaaaatattaaaaaataagctgggcatggtaatgcatgcctgtggtcccacctccttaggaagctgaggtgggaggatcgttgagcctgggatgtcaaggctatagtgagccatgactgcgccactgtactccagcctgggcgacagaacaagatcccatctcaaaaaaaaaaagttgaaagaacttcaaacttttagaaaagttgtaagagtagtacagaaaactcccaaacacccctgacctggcttctctagttaacatttgctccatttgctttgtcactcacgtttgggacttcaccacagtcaccatctcatcacccttacacatttcagtgtgatactcttgcataagtacagcgataaaatc[134 bp omitted]tcctggattcacgccattcttgtgcctcagcctcccaagtagctgggactacaggcgcccgccaccatgcccagctaattttttgtatttttagtagagacggaatt[131 bp omitted]atcttgctctgtctcccaggctgcactacagtggcgcgatctcggctcactgcaacctccgcctcctgggttcaagcaattctcctgcctcagcctcccaagtagctgggattacaggtgtgtgccaccacacctggctaattttgtatttttagtagatacttgattttgccatgttggccaggctggtcttgaactcctgacttcaagtgatcctcctgtctcggccttccaaagtgctgggattacaggcctgagccaccagccttggcccccatcttaaggtctttaatgtaatcccatccgccaggaccccttagcccggaaaggtcacgcattcacaggttccggggatcaggatgtggatatcttttagggcaccagtatccagctgccacaacacccaggctcttcccgtccctcctctgcccagagcctgcccccggcaccccagtgccctcaggcccgcattcatgttcctcttgtctgctcggagcctgggtggaccttggccacacccgcccaaccctgcccttcccgtatgcaccctgaccttcttgcgtcagcatttttagaaattgctggcgtgcagccttgggacctttgtccgttcgccccgctctcccgtgacattctttctcagggctctttgcctggtccatggaccttccatctcccctggaatgtcacctcctcagggtgtcaccgccccggctgtcctgtgtgaaggagcctctgtgttatttgtgtccttggtattcctttgttcatcccttggtcgcctgttctctgtctctctagactgggtgct[136 bp omitted]gcctcctgagtatctgggattacaggtgcccgccaccatacctggctaattttgtatctttagtagagacagggtttcaccatgttggccaggctggtctcaaactcctgacctcaggtgatccacccgcctcagcctcccaaattgctgagattacaggcatgagccaccccgcctggcctccaagagtcagaattctgtcatcatttgattcctgctgtgtccatagcggccggcgctgggtcagcctggaatagcggctcaacacacgtccctggcacaaataatgaatttgagattcagtttgtacctgtgtcctgcacacctgtcactcctctgggctcagccagggccggagctgcctccactgcagcctaggtctcccaaattctagctgcccgtgtgtgtgtgtgtgtgtgtgtgtgtgtgtgtgtgtgtgtgtgtgtgtgtctttctgcccacttgaccaaggggtgtgtgtgtgtgtgtgtgtgtgtgtgtgtgtgtgtgtgtgtctttctccccacctaaccaagggccactggaggccagggccaggctgattcattttgggtccagcattgcacagcgcaggcctgggcccctagaagcctcgggagacatgcgtgcggtaagtgtgtgttggcagcgtgtgcgctgtcctttcctgcctggaaaccctaccccttcctgactacttggaaactcccatatgagggaggctgcacttgtttgctgaggccgctgtaaccaagtaccactgaccaggtgcttcagcaacagaacttgactgtctcatggcctgcagtcagagtccaaagtgaaagtattggcagggttggttccttctggggctatgagggaggatctgtaccaggcccctctccttggcttgcagatggccgtcttctcactgcattttcacaccatctttcctctctgtgtgcctggcccaaatttctccttccattattattttttattaattattattattattatttttttttttttccaagacagagttttgctctcgttgcccaggctggagtgcggtggcgcgatctcagctcactgcaacctctgcctcccaggttcaagcgattctcctgcctcagactcctaagtagctgggattacaagcacgcgccaccacgcctggataattttgtatttttagtacagatggagttttgccatgttgggcaggctggtttcgaattcctgacctcaggtgatccacccgccttggcctcccaaagtgctaggattacaggtgtgagccaccgcgcccggcctattattattttgagacagggtttcacttctatcctccaggctagagtgcagtggtgcgatctcggctcactgcatcctccccctcccacgctcaagtgattctcctgccttagcctcctgagcagctgggactacaggcacacaccactgcacacagctaatttttatattttttgtagagatggggtttcaccatgttgcccacgctggtctcgaatgcctgagcccaagtgatcctcccacctcagtctcccaaagtgctgggattacaggcatgagccactgtgcccagtcataaatttctgccttttataaggtcaccaatcatgttggattagggcccacagtaatgacctcatcttaacctgattccctctgtaaagacctagtctccaaatcaggtcacattctgaggtactggggcttaggacttcaacatagaaacttaggagcgtgcaatttaacccctaagattggttgatgctttatcaaaaattttgatgtttttcttttgtttgtatgtatgtatttattttatttatttatttttcagacggagtctcactctgtcaccaggctggtgcagtggcgtgatctcggctcactgcaacctccgcctcccaggttccagtgattcccctgcctcagcctcccaagtagctggggctacaggtgcgcaccaccatgcccagctaattttttatgtttttattagagatggggtttcacc[143 bp omitted]cacacctgtaatcacaacactttgggaggccgaggtgggtggatcacctgaggtcaggagttcaagaccagcctggccaacatggtgaaaccctgtttctgtttctactaaaaatacaaaaattagccgagtgtggtggcatgcacctgtagtcccagttactcggggctgaggcaggaggattgcttgagcctgggaggcggaggttgcagcgagccgagatcctgccactgcagagtgaaaccctgtctcaaaaaaaaaaaaaaagaaggaaaagaaaaaaagaaatggttgagtgtcatggtttttggatgtccaatggctggttcccatccttgctctgccacttgctagctggtaccctagaccagtcacaacccctcaaggggtctcagttttcacattcataaaatggggataatcataaaacccttgttgtcaggattttgtggaaagtgaatgaattaatacagttaaagtgcttagggcatggcctggcatctagtaagtaggcactacatgttagtttttattatggttattattgtaagcatcagactcagtcgtgggatcacctcctccaggaagccttccctgattgccccaggttcaagctgtcttctgggcttccctagtgctgtccgtgacttctttggatcatgtctggcccaagatgggggttctgaaagaacatgccctcaggtgttggactcttccctctcttccagatgtacaggtggatcatctgaatctcctgaaacagtttgaacacctggaccctcagaaccagcatacattcgaggcccgcgacctggagctgctgatccagacggtaatgggagtgggtccggaggcagaggattgagggtagctttgcggaaggggagaaggggacagagtcccagacgtgagccagctcaccattcctgctggtgttctctgaggttggaggctggtagagggctgagtcgtttcttttcttttctttttttttttttttttgagacgaaatctcgctgttttcccccaggctggagtgcaatggcacaatctcggctcactgcaacctccgcctcccgggttcaagcgattctcctgcctcagcctcccgagtagctaggattacaggtgcctgccgtcacgcccagaaaatttttgtatttttagtagagacagggtttcaccatgttggccaggctggtctcgaactcctgacctcaggtgatccacccgcctcagcctcccaaagtgctgggattacaagtgtcagccaccgcacccagctcttcttatagtgatacccaccgtaatctagcaggccatcatcttaactaattacatctgcaaacactctatttccaaataagatcacattctgagattccaggtggacatgaatttgggagtgtggggggagtatactgttcaacctggtattgttaactccattttacagaggtggaaactgaggcacaaagaggctgagtaacttgcccagtgtcacagagcttatgagatttggtcacaaagcaaagcctagatttgaacgctgggcaaaatagttagaaacctcttgttctttttttggtttatttttactttttttttttttttttttacctgagacagcgtcttgctctgatgcccaggctggagtgcagtggcatgatcacagctcactgcagcctcaacctcctgggctcaagcaatcctcccacctgaccctcctgagtagctgggaccagaggtgcaagccaccgcaccaggctaattttaaaaatttttagtagacacaaggtctcgctgtgttatgtgagttagtcttgaactcccgggctcgagtgatcctcccaccctagcctcccaaagtgctaggattccaggcgtgacccacctctcctagtctgaccttatgttcttggccacctagctgtacctgaaatacataaatactaagttcaccacatatgttgttcctatttacttattcctccaagatctggagattgtggaggacttgaaagaggtgggttgaagttgctattgtataaccgtcccaatctgttttgaataaagagaagaaagtgtgttatggggcaggagcagtcatggaaaccaaaaagggcgacatcaggctgtgcgcgatggctcacgcctataatcccagcactttgggaggctgacgtgggcggatcacctgaggtcaggagtttgagaccagcctggccaacatggtgaaacctcgtttctactaaaaatacaaaaatcagctgggcctggtgacacatgcctataatcccagctactcgaaaggccgaggcaggagaatcacttgaacccggaagacagaggttgaagtgaggcagtgagcagagattgtgccaccgcactccagcctgggcaacagagcaagactccctctcaaaaaaaaaaaaaaaaaaagggacattaggacacgagacgtaagaaagacaggtagaggctggggctgccctcagccaggttcagggccaagggcctgccatttacaggctggaattgggggctgggcagagggggcagaggggaatgaccctgtgcctttccccaggccacccgggaccttgcccagtacgacgcagcccatcatgaagagttcaagcgctacgagatgcttaaggaacacgagagacggcgttatctggagtcactgggagaggagcagagaaaggaggcggagaggaagctggaagagcaacagcgccggcaccgcgagcaccctaaagtcaacgtgcctgtgaggaccccatttgtgcccatccactccctaccacatccagttcaaacgcaagacaagaaagcagttaaagaactacaattcccaggggcccttgaggcaaaaaaactccctgttactgtacctggctgccccagggtctgctgggagttgtagttttcttagttttcttgcttgagggagatgatgtttgttggatgagggtaaagggatatttggttttatcccatggcatccagacttcttgctcatgagctcctggctctcccctccacagggcagccaagcccagttgaaggaggtgtgggaggagctggatggactggaccccaacaggtttaaccccaagaccttcttcatactgcatggtaaggtggggagggagttccagagccaggatgaaccctagattctgacccttctaggacctgaatgctaagaggggtgtgtctgtcccaggagggcttagtcaggcccaagagccaagcctatgtcccctggttgaccagacagccctgcctctcccgactacaaggctaggatctgcatggaagggttgggcctcttttctagcaaacaccagacctcggggttctaaggacagctggtgtcctctgtaagcaaaccaggcttggctaggcctgggccctctgcccacagcagcccaggagaagccctggtccactctgggaaccctgtcgctaggagtgggttgttccctaagaaccaggcctccagaagcctggaaaaccctttctctttttctttttcctttttttttttttttttgagatggagtcttgctctgttgcccaggctggagtgcagtggcatgacctcggctcactgcaaccccctgccctccgcctcccgggttcaagtgattctcctgcctcagcctcccgagtagctgggattacaggcatgcaccaccatgcccggctaacttttgtatttttagtagagatggggtttcaccatgttggccaggctggtctcgaactcccaacctcgtgtgatctgccccctcagcatcccaaagtgctaggattacaggcgtgagtcactgcgcccggcctcgaaagccctttctctatggtggatcaaaggcacactcccctcagtctgtctcttcctgtctggaaatgtggcctggggttgccaagccccctcaggtatgccaagcaccctgtcccagaatctgtagccggtcagataagcttagcaaggcctgactcattcattcagcaaacctttcctaagttccctctaaggaccaagctttgtcaagaccccgtggatacaactgtaaacaaaacaaagtacctccccctcagagccagtgatcaggcacacagatcataccatactttagtaactccacgagactgtacagtatgagaggtgctagcattttacgtaagctgccaattaaattaacgtaccattgaaaacaagatgcgtcctgggctgggtgtagtggctcatgtctgtaatcccagcactttggtaggccaaggtggaagatggcttgagcccaggaatttaagaccagcctggacaacaaagtgagaccctgtctctatttaaaaaaaaaaaatagaccaggcgtggtggctcacgcctataatcccagcattttgggaggttgaggtgggaggatcacctgaggtcaggagttcaagaccagcctggccaacatggtgaaaccccatctccacaaaaataccaaaattagctgggcatgatcgtgagtgcctgtaatcccagctactcaggaggctgaggtgggagaatcacttgaacccgggaggcagagtttgcagtgagccaagatcgtgccattgcactgcagcctgggtgacagagcaacactccatctcaaaaaaacaaagaaaaaaataaaaattaaaagttaaataaataaagatacatccctatttcaggggtgataaaatagaagaacacaaaagtgcatctcagaatcaacgaaggttctaggccgggtgtggtggctcacgcctgtaatcccaacactttgggaggcctaggcgggtgggtcccttgaggccaggagttggagaccagcctggccaacatggcaaaacccagtctctactaaaaatacaaaaattaaaaaacaaaacaaaaattagccaggcatggtagtgctcacctatagtcccagctactcaggaggctgaggtaggagaatcgcttgaacccgggaggcggaaggcgggggttgcaatgagctgagatcacaccactgcactccagcctgggcaacagagtgagactctgtctcaaaaagcaatagaaagtaaaaaagaattagaagattctgtaatggggtctcaggtagtgacgtgtactacctcgcagccttgaccacccaggttcaagtgatcctccccctcagcctcccaagtatctgggaccacaggcacgtaccactatgcctggctaatttttttaatttttagtaaaggcaaggttttaccatgttgcccaggctggtctcaaactcctttgctcaagcgatccacctatcttggcctcccgaagtgctggggttacaagcatgagccatcccaccgggcaccaccccccgtgttttgttttgttttttttttgagacaggatcttgctatgttgcccaggctggagtcaaactccaggcctcaaacaatcctcctgcctcagtcacctgagtagctgagactgcaggtgtgtgccactgcgcccagctttaaagatgtttaattgtacagttcaatagtattaagtatatttacactgtcatgcaaccaattctgagagctcttcatctcgcacaaccgaaaccgtatccattaaaccactcgccctccccttctttcccctgctctctagcaaccaccattctattttctgtctctatgattttgactattttaggtacttcatgcaagtagaatcttttggtatttgtcgtgtgtgtgtgtgtgtgtgtgtgtgtgtttggcttatttcacttagcataatggtgaggaactgaagttttcattctactggatattaatttctatttcaattgccccatgtggctagtgg[145 bp omitted]cacaaacccatctctacaaataaaatacaaaaattagctgggtgtggtggcgtgcatctgtagtcccagctccttgggaggcagaggtgggaggatcacttgagtccaggaattcaaggctgcagtgagctatgatcataccagtgccctccagcctgggcaacagagtgaaaccctgtctctaaaaaatagaaaataggctgggctcagtggctcacgcctgtagtcccagcactttcggaggcca[132 bp omitted]gaggcaggagaatcacttaaaccctggaggtggaggttgcagtgagctgagatcatgccactgcactccagcctggcaacagagcgagactctgtctcaaaaataaataaacaaataaataggcccggcgcagtggcttacccctataatcccagcactttgcgaagccaaggcggctggatcccttgagaccaggagttcaagaccagcctgggcaacatggcaaaaccccatctctatgaaaacaaatacaaaaattagctgggtgtggtggcgtgcatctgtagtcccagctacttgggaggctgaggtgggaggatcacttgagccgaggagttcaaggcttcagtgagctacgatcacaccattgcactccagcctgggtgacagagtgagaccctgtctctaaaaaataaaaaaataaaaaccttatttaatctttttaatcaggcagtccctacagaccagaataggttcagagcaactccctatacctttttttatttttcattttttttatttttagagatggggcttccctttgtcacccaggctggagtgcagtggcgtgatcatggctcactgcaacccagacctcctgggctcaagtgattcttccacctcaacccttagagtagctgggatcataggtgcacaccaccatgcccagccaatttttaaattttttttttctttttgaggcagagtcttgctctgttgcccaggctggagtgcaatggcatgatcttggcacactgcaacccccgcctcccaggttcaagctattctcctgcctcagcctcctgagtagctggggttacaggcacttggcattatgcctggctaatttttgtatttttgtagagacggggtttt[148 bp omitted]catcttttctaagctggtctcgaacttaatgtgctcaaatgatcttgccttagccttccaaagtactgggattacaggcatgagcccctaaatttggcccctacattttctttaatcttaatcaatttacatttaaacagcccatgtggctagcggctactgtactggacagcgcagatccagagtttaggcagagaagagacccccaggcctgagccctgggccacactagcatgtggaggtcaggaagaggatggagccgtcaaaggaggtggaggggcagccagagaggacagaatcatgttctggaagccaagggcagaaagtcaagtcagatgcaggtggaaattaaccactggatttgcaagatgagggttcctggcctcctcctcaggaggaaggttgtgcttgtctgagggagccgaggaaggagggccggtggtgaggacaggaagtgtggctgaccgagcctgaagccctgcagctgtggggtctacgttggtaggagaggctcccctcacaactggagtcggcactggcctggttgtctgggaggcagaggtccctgataaccctggagctgactctgtgtccagagcactgaatgccagggccagagaatcctgcatgacagtgacccaagcatgtttcctcgaaccctccctttgatctattccattctcaaccccctggtcgctaggcagtggccctagcaacgggtctagtggggtactaaagcctgggggccaccgttccaccgcgggagacccgtagttacctgtcctctgataacagaccccacatcagcccaaaatttcttcaccagggaccttacacatcccgtcctcggtcccctgagataccttgctatcctcttcccttcagatatcaacagtgatggtgtcctggatgagcaggagctggaggcactcttcaccaaggaggtgagcatcttggaagcctcgggcacctggagggacgcccaaatcagccacttgtttcctcctgcagtccccttaaatccccctggatgggagctcagtgaaaactacaactcccatcagcccctggggcaaaaacggctcccaggagtggtagcgtgcccaaaggactgctgggagttgaagttgtcgggaatgagctcgctggggacctctcaatgctgtctgcctctcgcttgctcctgcagctggagaaagtgtacgacccaaagaatgaggaggacgacatgcgggagatggaggaggagcgactgcgcatgcgggagcatgtgatgaagaatgtgaggtgggggccaggcgggggagaggacgggcccccagctctgtcactcacccttatctggctccccaggtggacaccaaccaggaccgcctcgtgaccctggaggagttcctcgcatccactcagaggaaggagtttggggacaccggggagggctgggaggtgagaacatgggggatactcggggtcctgaacctctctctcttctagccatgacctttctttcagaatcttaggccccttctctttctctctgggtccccgtccattctcctgggtcactgcatctctatctctgggtctctgttttcccctgtctctaggactcttatttatttatttatttatttatttatttatttatttattctgagacggagtctcactccatcgcccaggctgcagtgcagtggcacgatctcggctcactgcagcctccacctcccaggttcaagcaattctcctggctcatcctcttgagtagctgggattataggtgcgtgccaccacacccagctgatttttgtatttttagtagaggcaggatttcaccatgttggccaggctggtctcaaactcctgacctcaggttatccacccaccttggcctcccaaagtgctgggattagaggtgtgatttttttttttttttttttttttctgaaacagggtcttgctctgtcgcgtaggctggagcccagtggtgggatctcggctcactgcaacctccgcctcttggattcaagcgatcctcccatctcagcctcatgagtagctgggattacaggcgtgagccaccatgcctggctaatttttgtattttttgtagagatggggttttgccatatcggccaggctgctctagaactgctggactcaagcgatccacctgacctggcctccctaagtggtgggattacaggcatgcaccaccgcaccacacctagctaatttttgtattttttggtagagacagggttttgcatgttggccaggctgctctgaaactcctggactcaagctatccacccttctcagcctcccaaagtgctgggattacccaggctggagtgcaggggtgttatcatggcccactgcagcctcaaactcctgtcctcaagtgatcctcctgcctgagcctccctattagctgggactacaggcacatgccagcatgcctagctaatctagctcattcttttatttatttattaatattttttgagacagggtctcctgtcacccaggctggagtgcagtggtgtaatcatagttcactgcagccttgaattcctgggctcaggtgatcctccttccttagcctcctgagtaactgggactacaggcacataccaccatgcccagctaatctaggtctctgttttatttatttatttatttgtttgtttatttttcaatacagagttttgctcttgttgcccaggctgtagtgcaatggtgcattctcagctcattgcaacctccacctcccaggttcaagcaattctcctgcctcagcctcctgagtagctgggattatatgcatgtaccaccatgccctgctcattttgtatttttagtagagacggggtttctccatgttggtcaggctcatctcaaactactgacctcaggtgagccacccacctcggcctccgaaagtgctgggattacaggtgtgagccatggtgcctggcctatttctatatatttttcaagatgcccagccaattttctgtagagacagggtctcgctccgttgcccaggctgaccttgaactcctggcgtcaagtgatccttcccactttcgcctcccaaagtcctgggattacaggtgggagccatggtgcccggccttgtctctcggtctttatcccactcccacctcccacttgggcttctttgcccacccacatggccctggcctcccagcctcctctacacctcccccattggcacaaccctctccaacatgggtgggccgaggttggacctgtgcccctgatggcccctgtgcctgccctgcagacagtggagatgcaccctgcctacaccgaggaagagctgaggcgctttgaagaggagctggctgcccgggaggcagagctgaatgccaaggcccagcgcctcagccaggagacagaggctctagggcggtcccagggccgcctggaggcccagaagagagagctgcagcaggtgacagcgggggaagctgcttccatccactgaatctctggctgcccgtgtccgtgtccccatgggtgtccagaagctgggaaggcctgtggccaccatgttaatcactgggggagcctcaagtattcaccgccatcttgagtaagggcagacgttttcccgtctctgacggctctgtggctgccatgtgagataagggcattaaggctgtaagtgaggagggaaaggcccaggagggggagaaaggcagactcagccagggatgggtgagggtttccctgtcccaaagcaagacccaagctgtgactggagggagaactggatccttgactattattaagcccgactgtcaatgaaagagagaaactgaggcccacggagaaggggttggccgtgaccacttagcaggctgctgtgaagtctccgtttggggactgaggcctgagcacttgcaatgccagcatcacaccctcttgtctgtgtgaccccccacctcccacaggctgtgctgcacatggagcagcggaagcagcagcagcagcagcagcaaggccacaaggccccggctgcccaccctgaggggcagctcaagttccacccagacacaggtgctggccctagtccagggaggaggggctgcagggctggacccctgggtctgaggttggaggggctgggcctggactcccagatctgagggaagagggactgggggcccagactcccagatctgagggaagagggactgggggtccggactcctgggtctgagggaggaggggctgggggctgggacccctgggtgtgagggaggaggggctgggacccctgggtgtgagtgaggaggggctgggggctggacccctgggtgtgagggaggaggggctgggggctggacccctgggtgtgagggaggaggggctgggcctctggggtcctgggggaggaggggttcggatgtcctgtgccaccattccctccctccatttccagacgatgtacctgtcccagctccagccggtgaccagaaggaggtggacacttcagaaaagaaacttctcgagcggctccctgaggttgaggtgccccagcatctgtgatcctccgggaccccagccctcaggattcctgatgctccaaggcgactgatgggcgctggatgaagtggcacagtcagcttccctgggggctggtgtcatgttgggctcctggggcgggggcacggcctggcatttcacgcattgctgccaccccaggtccacctgtctccactttcacagcctccaagtctgtggctcttcccttctgtcctccgaggggcttgccttctctcgtgtccagtgaggtgctcagtgatcggcttaacttagagaagcccgccccctccccttctccgtctgtcccaagagggtctgctctgagcctgcgttcctaggtggctcggcctcagctgcctgggttgtggccgccctagcatcctgtatgcccacagctactggaatccccgctgctgctccgggccaagcttctggttgattaatgagggcatggggtggtccctcaagaccttcccctaccttttgtggaaccagtgatgcctcaaagacagtgtcccctccacagctgggtgccaggggcaggggatcctcagtatagccggtgaaccctgataccaggagcctgggcctccctgaacccctggcttccagccatctcatcgccagcctcctcctggacctcttggcccccagccccttccccacacagccccagaagggtcccagagctgaccccactccaggacctaggcccagcccctcagcctcatctggagcccctgaagaccagtcccacccacctttctggcctcatctgacactgctccgcatcctgctgtgtgtcctgttccatgttccggttccatccaaatacactttctggaacaaatgcatggctccatgcctgtgtatctggactggtccctccaaaacgctattgccacgtcacctgccggagtcctcatctttgaagactggattcaagcatcacttctgagaggctcaatcctggtatttttccatctgcccctgatgagtctgcagccttcactcagggtcccttcagccacaaggacagaaaacccaaacctgggattaagcaattttttttttttttttttttgagatggagtcttactctgtcacccaggctggagggcagtggtgtaatctcagctcactgcaacctctgccttttgggatcaagcgattctcctgcctccgcctcccgagtagctgggattacagctgcctgccaccacgcccggccttctaatttttgcattgttttagtagtgatgggggtttcaccatattggccaggctggtcttgaactcctgacatcatgatctgcccaccttagcctcccaaagtgctgggattacaggagtgagccactgcacctggccgggattaagcaacttttaaaagatgaatttggccaggtgctgtggctcacgcctgtaatcccaacacttcgaaaggccaagataggggggatcacttgaggccaggagttcaagaccagcctggtcaacatggcaaaaccccatctctactaaaaatacaaagatgagccgggtgtggtggtgggcacttgtaatcccagctactcgggaggctgaggcaagagaattgcttgatcctgggaggcggaggttgcagcgagccaagattgcaccactgcactccaaccggagtaccagagcaagattccatctcaaaaaaaaaaaaaagaatgtaccaggtatggtggctccacctgtagtcccagcactttagaaggcagaggcggatagatcacgaggtcaggagatggagaccatcccggctaacacggtgaaaccctttctctactaaaaatactaaaaaaattagctgggcgtggtggcaggcacctgtagtcccagctactcaggaggctgaggcaggagaattgcttgaacccaggaggcagaggttgcagtgagccgagatcatgccactgcactccagcctgggtgacagagcgagactctgtctgaaaaaaagaaggctgaggcaagaggatcacttgagcttaggagtttgagaccagcctgggcaacatagcgagaccccgtctcagaaaaagaaaaaaaattagctgggcatggtagtgtgtgcctgtagtctcagctgcttaggaggctggtgtgggaggatcccttgagccctggagtttgaggctgcagtgagccatgatctatcactccactgcactccaggctgggtgacagaatgaggccctgtctctaatagaaaaaagaataaataaaaatgaattatgataaaaaccaagatgtcccaaggcaggatgacttcagggaaccaggttctcgcatcccctagctgtgccaaggataggtttgggggctggaccccccctcatggtcccaaggtagctgcagctgctccagatgtcaccaacagccagtgaaggaagaggccgcattctgttctgggcattgttaagtgggagaaaatctgtccccagagttccctctcctttcagccctctcctcatgttcccttatatcccactggctgtgaggcacaggtcagtgacagctgcagacagatccaccaagctggcatccaccagtggtgatttcatcctcacctgggatggggatgctttccttggaccaagttggggtctggtaaaaagcaagcggggaatatttgtttttgttttgttttgtttttggagacagagtcttgctctgtctcccaggctggagtacgatgacgcgatctcggtttactgcaacctctgcctcctgggttcaagcgattctcctgcctcagtctcctgagtagctgggattacaggtgcccagcacacacccggctaatttttctgtatttttagtagagatggggctttcaccatgttggtcaggctggtcttgagaactcctgacctcaggtgatccccccgcctcggcctcccacagtgttgggattacaggcctgagccaccacgcccggccaggagtatttgtttaaatgaaattctggccaggcacagtggttcatgcctataagctcagcactttggaggccagggatgggcagggtggggggtttcaggagaggatgacaggaggatgactcaagctcagagctcaagaccagcctgagcaacatagcaagacctcatctctaaaaaaaaaaaaaaaaaaaaaaaaaaaattagccgggtgttgtggcatgcacctgtggtcccagctactcaggaggcttaaggacagaagaatcgcttggccacagaaggttaaggctacagtgagccatgaccacgccactgcactccagcctgggagacagggcaagaccctttctcgagaaaaataaataggccgggcacagtggctgatgcctataatcccaacgcttcaggaggccaaggaggaaggatcctttgagcccaggagtttgaggccaacctgggcaatatagggagaccccatctctatgtaaaaaaataaataaatagggccaggcgcagtcactcacaactataatcccagcactttgggaggctgatgtgggcggatcacttgagggcaggaattcaagcccagcctgggcaacgtgaaaccccgtctctacaaaaaaataccaaaattagccgggcgtggtggtgtacacctgtaatcccagctactcagggaggctgaggcacaagaatcacttgaacctgggaggcagaggttgcagtgagccaagatcacactactgtactccagcctgggtgacagagcaagactccatctcaagaaaaaaaaaaaaattagctgggtgtggtggcacatgcctgtagtcccagctacttgggaggctgaggtgaaaggatcgcttgggcctgggaagcggtgattgcaacgctgcacatcagcctgggtgaccaagcgggactctgtctcagaacaaaacaaaacaaaaatacatattcccagatcctggaatgtcctgggaagctatatgtgtgtcatgccctcccagctgcacctgaacaatgagcatagcaaacatcagctgcagcctctctttgcctctctcagaaaatgaggggagttgagcttcagtgacccaatctggaaaacgggcctaaatggtgttctttgaaaggttcatataggcaaagcggtccccaaatgccgaaggagccaagaaaccaaagaatgaggccgacccatctagtttgtcaatacagggtggtttattagggggaaacttagagtgtggtcttcgccaggcatggtggcttatgcctggaatcccagcactttgggaggccgaggcaggtggctcacttggggtcaggagttcgagaccagcctgactgacatggtgaaacttgtctccactaaaaatacaaaaattagccaggtgtggtggtgggcgcctgtaatcccagctactggagaggttgaggcaggagaatcacttgaacccgggaggtggagactgcagtgagccgagctcacgccactgcactccagcctgggctacaaagcaagaccctgtctggaaaaaaaaaaaaaagaagtgtggtcttgggcagcagcaagacagatagatcacaccctgcaacccccagacacagggcttctatctcgaggaaagcatatctgtgctctggaagaaacgcgtaggtggctatgggcgatacatcttgtgatggatgtgacaacatcaaggcttgttctggaggaaaggctggtaagtacgtgtttctacataaagagtaacacatccgttagacatgttggaggcattcccagtttcgggttagtcagaagtcacacggcaggctgggtgcagtggctcatgcctataatgccagcattttgggaggctgaggcaggaagaccgttcgagcccaagagtttgaaaccagcctgagcaacatagtgaaaccccgtctctttttttttttttttgagacagagtctcactcttgttgccggtggctcgatctcggctcactgcaacctccgcctcccgggttcaagtgattctcctgcctcagcctcctgagtaactgggattacaggcgcccaccacgcccagctaatttttgtatttttagtagagacagggtttcgccatgttggccaggccggtctcaaactcctgtcctcaggtgatctgccctcctctgcctcccaaagtgctgggattataggcatgagccaccacgcccagccaaccctgtttctttctttttcttttttttttttttttgatacggagtcttgctgtgtcccccaggctggagtgcaatggcacagtctcggctcactgcaacctccacctcccgggttcaagcaattctcctgcctcagcctcccaagtagctgagattacaaaccccgtctcttaaaaaaggaaaaaaatcacatggcagagtagcattttaaaataaagtcacgaggctgggcgcggtggctcacgcctgtaatctcagcactttgggatgctgaggcaggcgaatcacccgaggtcaggagtctgagaccagcctgacctacgttgagaaaccccgtctctactgaaaatacaaaattacccgggcctggtggcgcatgcctgtaatcccagctgctcaggaggctgaggcaggagaatcgcttgaacccaggaggtggaggttgcggtgagccgagatcacgccattgcactccagcctggacaacaaaagcaaaactccgtcttaaaaaataaataaataaataacattaaactacgtcactcagcctgtgaacaatggctcacgcttataacccagcaatttgggaggccgcagcaggtggatcacttgaggtcacgagttcgagaccagcccggccaacatggtaaaaccgcatttctactaaaaatacaaaattagctgggtgtggtgatgggcgcctgtaatcccagctactcatgaggcaggagaatcgcttgaacccaggaggcggaagttgcagtgagctgaaattgtgtcactgcactccagcctgggtgacagagcaagactccgtccaaaaaaaaaaaaaaaaaaaaagggaccatgttctagtgtaggggtaagtggattgttttggccccaaccccaagaggatcaagggagaccactgcagctgcccgagaaattcttgccctctgacaagaaacaccctatccagtctggggaatttgccagtccaacccctccccttggctcaagattctgggaaatcctaaatagtgtttaccattggccttttatcagctccagtataaatgcgtctggccagacttgctttacaactatgcataatggatagttgggccaggcttggtggctcatgcctagtgctttgggaggccgaggtgggaggatcacttcagcccaagagttggaggccagcctaggcaacatggtgagacaccatctctacaaaaaaaaattttattttctgttttttttttgagacggagtgtggcgctgtcacccaggctggagcaacagagccagactttgtctcaaataaataaataaataaataaaacctgcaaaaaaatttttttaaatgccatttttctttctttctttctttctttttttttttg[135 bp omitted]catgcccggctaattttttgtatttttagtagagatggggtttcactgtgttagccaggatggtcttgatctcctgtcctcgtgatccgaccacctcggcctcccaaagtgctgggattacaagcgtaagccaccgcgcctggccatttttctttttaatcaatcctgccacttgaagattatatggtaagggaaatctgcagtctatacacaatactgagttgctccaagcccttgaggattgtgagggacccagtgttctaattcttgctagagtgtctacctccatgttaccagaggcgagtctgaccgggtactgacatgtgatataccattaagtgtgcagtgggttcttttagcctttcccaaatgtctttccacatggcagcgccccacagcattttctttttcttcttttttctttttcttttttttttttttcttttttttcctgggcaacagagtctcactctgttgcccgggctagagtgcagtggcgtgatctcggctcactgcaagctctgcctcctgggttcaagcgattccagtgcctcagcctcccaagtagctgggattacaggtgcacaccaccacgcccagctaatttttgtatttttagtagagatggggt[145 bp omitted]caggctggagtacagaggtgccatcatagcttactgcagcctcaaccttcccagctcaagcgatcctcccgcttcagcctccctagtagctgggaatacagatgcacaccaccacacctggctaattttttgcaggttggtctcgaactcttgggctcaagagatctgcccgccacagtctcccaaagtgctgggattacaggcatgtgccaccgtgcccggcatattttcttttcagtgtttacctttttgcctcctct[141 bp omitted]aaaccctgtctctactaaaaatacaaaaaattagccaggcgtg[134 bp omitted]tcaaaaaaaaaatatatatatatattatatatatatatttttttttttagaccgggtcttcctctgttgcccaggctggggtgcagtggtgtgatctcggctca[133 bp omitted]cttgatctcctgacctggtgatccacccatcttggcctcccaaagtgctgggattacaggtgtgagccactgtgcctggccgctgagtagtattttgttgaatccactggcagcttaaaggacatttgggcttgagctatgtacagctgctaacacctgtgcactggtttgtgtgcaaacatgttattttttctttctaggacaaatacctgggagtatcaaaattattttttgatatttattattaaatgattttttcttttt[138 bp omitted]cctcctcctcccaggttcaagcaatttacctgcctcagcctcccaagaagctgggattgcaggcgtccgccaccatgcttggctaattattttgtatttttagtagagatgggggtttcaccatgtttgccaggctggtttcgaactcctgaccttaagtgatccgcccaccacggcctcccaaagtgctaggattacaggcatgagccactatgccctgccccctccccccactttttttttttggtagagatggggtcttgctttgttgcccaggctggtctcaaagtcctggcttcaagcattcctcccatttgggcctcccacagtactgggattacaggcgtgaaccaccgtgcctggtcccatttgtgtttctattcagcagtttgtgtaaacttgaagtctgtgaatccatgtgtgacactcaggtcttaattattgtctaccaagtaagagaaagtgacaatatcctgccctgtgtgaagctggccagccagttaggaattatcatgtcccaaccagcctgggaaacttggcaagaccctgccttgataaaaagtttaaaaatcgactggacacagtgtctcatacctataatcccagcactttgggaggctgaggcaggaggattgcttgagcccaggaattggagaccagcctggacaacaaagtgagaccttttctgtacaaaaaattgctgggcatggtggctcatgcaggtaatctcagcactttgggaggccaaggcaggcggatcacctgaggtcaggaattcgaggccagcctggccaacacagtgaaaccccatctctagtaaaaatacaaaaattagtcgggcgtggtagtgggcgcctgtcatcccagctactcgggaggctgaggtaggagaattgcttgaaactgggaggtggaggttgcagtgagccaagattatgccactgcatgatcaccccagcctggatgacagagcgagacttcgtctcaaaaacaaaaaacaaacaacaacagcaacaaaaattagcaggctgggtgcagtggctcatgcttgtaatcccagcactttgggaggccaaggcaggcaaatcgcaaggtcaggagatcgagaccatcctggccaacatggtgaaaccctgtctccactaaaaataaaaaaaattagctgggcatggtggagggcgcctgtggtcccagctactcaggaggctgaggcaggagaatcacttgaaccagggaggcggaggttgcagtgagctgagatcacaccactgcactccagcctggggatagagtgagactccgtctcaaacaaacaaacaaacaaatagcggtaagtggggcacatgcctatactcccagctactcaggaggctgaggcgggaagatagcttgagcccaggagtacaaggctgctgtgagctattatcacgccactgcagtccagctaggtaacagagtgagaccctatctctaaaataattaataaataaaacaaaataattagccaggtgtagtagccagtagctactttgggtcccagctactgtagtcccaggtactagggtggctaaggcaggagctaattccttgagctaaggaatttgaggctgcagtgagctatgattgtgccactgcactccttcctgggcgacagagcgagaccctatatcaataataattataataatacagtatattttacataatagaccatagagctcaatgaatcctcctcacaaccctatgtaggtagatgttatcatgatctctgctttccagaatagaaaagtgaggaccagagagggcgacctcttgtccaaaagcaatacagccaagaaggggcaaggagggttttgaaaccagtcggccaggctctggggctcctaacaagcaaagcagcctggtttctaaaactatagcttctggaagcagccaattcacaggtctttacctcctgactgtgagacctccaaaaaatgaccagggatcttggagtctgtttccccctttgtgaactggggacaatagaagctacttcccaggtctgcggggagaaattaggaacgaagaaggtaaagcgcagagctgaggagctggtctacaggtgctctatacatattagtaataattattaagtttgctgttacaatcctctctctctctgtgaacaacccctaatgatgcgtggctttgagagcaaaaaagtcagggcaaagttttgccacaaagtccagagggcaagacattaaatctaactctcaaggattggtgttggcaagaaagcaaacctctcctccccacgctgtccttaccccgcgtatccgacgagcctaaagtcataggtaagagatctgtagaagcgacgtcaaggtgtggttccctctgtaaggcggagctaaacggtgcattcgcccagcggggaagctagaactaaatgaccgctctgccgactggagccaacgagaatcggcgtaggcgcaatacgggcggaggatggggacccgcccccggggtgggcggggcgtcaggtacttaattcgcgcctggagggaccgaaggtgccgagggctccgcatcgcaaccatggcgctgcgctggggcatcgtgtctgtcggcctcatctccagcgacttcacagccgtgctgcagacgctgcctcgctctgagcaccaggtctgcccgccctccggattctggggaagaggaggcggggggcgggactccagagtctaaaggaggagggagtttagggttcaggactagtgagtgggtcgtcattgcagtgaaacgtctgtttccttgctacctccttctccatctctgttctgcaaacctgtggggaaaagaaagatcagattgttactgtgtctacgtagaaaatgaagacataagaaactccattttgaactgtactaagaaaaattgtttctgctttgagatgctattaacctgtaactttagccccaaccgtgtgctcacagaaacatgtcctgtattgaatcaaagtttaatggatttagggctttgcaggatgtgccttgttaacaatatgtttgcaggcagtatgcttggtaaaagtcatcgccattctccattctctattaaccaggggcacattgcactgcggaaagccgcagggacctctgcccaagaaagcctgggtattgtccagggtttccccccactgagaaagcctgagatatggcctcgtgggaaaggaagaccttacatcccctagcccgacaccagtaaagggtctgtgctgaggaggagtagtgaaagagggaggcctctctgcagttgagataagaggaaggcttctgtctcctgctctccctgggaatggactgtctcagtgtaaagcggaccattcccattccttctattctgagataggagaaaacctacctgtggctggaggcgagatatgctggcagtgatactgctctgttactctttgctacactgagatgtttgtgtaaagtgaaacataaatctagcctacgtgcacatccggtcacagcacctttccttgaacttattcatgatacagattccttttctacatagacacagtaacaatctgatctctctttcttttccccacacaaacctgagtgtcttgaggtttggaaaggccttgatgtaagctactatgaagataatttcaatattgggggatttaataacggctttcccccagatctctctttcccagggcccaaatgtccagcccccgtcatctcttcccccaggaccacgtctccccttcccctggccagagcctcctcctttgcctcccttccacccagtttccacgcctgcctcagcccctcaaatccgattcttgtgcccctccaggtggtggcggtggcggcccgcgatctgagccgtgcgaaggagtttgcacagaaacacgacatccccaaggcctacggctcctatgaggagctggccaaggacccgagcgtgggtgagtggcgagggcgatgggggtgctggccgccgcccctggagcggtgccccctggctgccccctgggagatgcaaggctcctcaggatggtccaatccctttgggttccataaagacctttggctgggaggagaactataaaacgggcttggtctgggactggctgtctagtaggtgttaaactacacttagcgttcgagaccagcctcggcaacgtagcaagacccaatctctacaaaaaataacaataaaaataaattagccaggtatggtggcacgcacctgtaatcccagctactggggaggc[136 bp omitted]cctgtaatcctagcactttgggaggccaaggcgggcagatcatgaggtccggagatggagaccatcctggctaatacggtgaaaccgcatctccactaaaaatacaaaaaattagccgggcatggtggcgggcgcctgtagtcccagctactcgggaggc[131 bp omitted]ttaaaaaagagagcgagaatggcgagaggtaacagccccttcctaaggacagctccctaagggagacaggggtgtgaccgaccacctggtccctgggtgctagggcggggcctcgaagttgtgggcggagctcggctgtctgggtgggcggggctgctgacctcttgacctactcccaccctagaggtggcctacattggcacccagcacccccagcacaaggcggcggtgatgctgtgcttggcggcgggcaaggccgttctgtgcgagaagcccacgggcgtgaacgcggcggaagttcgcgagatggtcgcggaggcccgatcccgagccctcttccttatggaggtgagggcagaggagcccttccaatatccagcgtaaaagtgcttgccattaaatatggttgccagtgcgcggacggggtcagtgcatttgccaggatgtatctgaatctccttggcagcatctattaccgtgaaagccattgcttttggcccttagcaaacacggcaaggcttactgaaattgcttgga[136 bp omitted]cccatctcttctaaaaatacaaaaaattagctgggcgtggtggcgggcgcctgtagtcccagctacttgggaggctgaggcaggagaatggcgtgaacccgggaggcggagcttgcagtcagccaagattgcgccactgcactccagcctgggcaacacagtgagactccgtctcaaacaagaaaaaaaacaaacaaaaaaaaaaacaagaaaaagatgccaagagtgaaagtggcatagaatggcaatggcttagtttgggtggggttccaggtagaggttgaaaggaccaaggaaccccctacaaacctgcagtgcagtggcgcgatctcggctcactgcaacctccacctcccaggttaaagcgattctcctgcctc[225 bp omitted]cttagccttgtaaagtcacacattcacagactccggggatcatcaggtcgtggatatctttgggggcaccagtagcctactgccacaacacccaggctcagagcctgcgcagagcctgcccccggctccccagtgccctcaggcctgtgttcacgctcctctcgactgctccgagcccgggcggacctcggccacatccgtcctgccccgcccttcccccgtgag[269 bp omitted]gtctaacacagtgaaaccccgcctctactaaaaatacaaaaaattagccgggcgtggtggcgggcgcctgtagtcccagctactcgggaggctgaggcaggagaatggcgtgaacccgggaggcggaggttgcagtgagctaagatcccgacactgcactccagcctggacgacaagagcgagactgtctttaaaaaaaaaaaaaaaaaaaaaagaaattgctggagtgcagccttgggacctttgcccattctcccggctctcccgtgacattctttctctgggctctttgcctagtccacggagcttccgtctcccctggaatgtcacctcctcagggtgtcaccgtcccggctgtcctgcgtgaaggaccctccattttatttgtgtccttggtattcctttgttcatcccttggttgcctgttctctgtctctctagactgggtgctccaagaggtagaactctggtttttgttgtcattgttgttgtttttgagacagagtcttgctctgtcgccaggctggagtgcaatggcgtgatctcggctcactgcaacctccgctgcccggctttaagtgattctcctgcctcagcctcccgagtagctgagattacaggcatgcaccaccacgcccggctaatttttgtatttgtagtagagacggggttttgctatgttgtccaggctggtctggaacttctgacctcaggtgatccgcccgccttggcctcccaaagcgctggggttacaggcatgagccacagcgcccagcccccagttccaggagtttttttttgttgttgtcattttgcatttttctacatagatgatgtcatctatgaacaaagagttttatttctaccttctgtatctatatgcctcctttaaggagtttcactaggagatgcacacgtaactcttaaacccactggcctgcatgctctatacctacatctaatctcttcttataaggacaccagtcatattgtcatatt[132 bp omitted]ttctcctgcctcagcttcccgagtagctgggactacaggcgtgcgccatcacgcccagctaaaattttttgtatttttaatagagacggggtttcaccgtgttggccaggctggtctcttgg[132 bp omitted]ggccacaacagttgctttcagaggtactagggagttaaggcttcaacacgtgaattgtgtttggcagggcagaagcgagagggagagagacacaattcatcccataacatggggagactggggcaatggtccagatgaaaaagaacaaaagtcaatagggcacggtggctcatgcctgtaatctcagcactttgggaggctgaggtgggaggactgcttgagcccaggagttcgagaccagcctgggcgacatagtgagaccctatctctattcaaaaaaaaaagaaaaagaagaaaagtcaagagggtcaggagcaagagggatacaacctggggactgatgggctgtgtttggagactgggttgcagtgggtatccccctatgattgggaccccagaagggattagaactggttggttaactcctttccttgtggtctgcaggccatctggacccgcttctttcctgcctccgaggctctgaggtctgttttggcccagggaactctaggagacctccgggtggctcgggcagaatttgggaagaatctcatccacgttccccgggccgtagaccgggcccaggctgggggggccctgctggacatcggcatctactgtgtccagttcacctccatggtctttggagggcagaagccagagaagatttctgtcgtgggaaggcgtcatgaaacaggtaccatctatcctggaatatttcatggtgatgggaatgattctgtctctctgggagcactgaactgaggacaagtctccaagtcaatgagaattagatcagacacctagaggaacaactttccatgaagccagagaggatcagagtcaagactgcaggtgggcactctcctgggactttgctgtgtgatcttagccagcagacttaacatctctgaatcttaattactttactggtaaagtgtcactaatagggttgtcatgggagttaatgaagtaactgctgaggcaaatggcagttaataaatataaaattattattttttgaagttgtctcagtgaatctttgctacaaaaaagactaccccacttggccaggcgtggtggctcacgcctgtaattccagcactttgggaggccgaggtggccagatcacctgaggtcaggagttggagaccaccctggccaatatgatgaaaccccatctctactaaaaatacaaaaattagctaggcattgcggcaggcacctgtaatcccagctatctgggaggctgaggcaggagaatcacttgaacccagggggcggaggttgcagtgagctgagatggcgtcactgtactctagcctgggcgacagagtgagactccatctcaaaaaaaaaaaaagctgccccactttgcagaagaggcccttgccttggcttccactcagctggaaagtatccaagagtgcctgagccacccagatgtgatgcccttcatctttgacctttaaccccaaggagcaagaggcagttcatgcttcattaaagttacattcagccgcaaaa[137 bp omitted]catggtaaaaccctgtctctacgaaaagtgcaaaaaaaattagttgggcgtggtggtgtgcacctatagtccggctactctggaaggtgaggtgggaggatcaattgagcctgggaggcagaggtggcagtgaactgagatggtgccactgcattccagcctggggaacagagccagaccctgtctcctttttgtggagaacagagtctcgctatattgcccaggcaggtctcgaactcctgggctcaagctatcctcccgcctctgcctccccgagagctgggattacaggtgtggccaccgcccccggcaagccagaccctgtctcaaaaaaaaaaaaaaacttagtgacttcaaatagcaatcatttattagcttgtgattctgtgcattggcaaattggggctgggctctgcttgatggttcttctgctggtcttattcctgcagctgcagtcagttggctgttcagctgggactggacagtctggtaggcttcatttatatcttacaggtggcaggcaactgtctgggaagccttgattctcctccacctggcctctccagctggctagataccattcatatcgtggtgtgagaattcctgatgtgcaagcacttttcaggcctctaattacaccatatttgctactggcccattggccaaagcaagttacatggccagctcagttttcagagatgggcaaatagactgtaatttttgtttttttttagatagtatctcactttgccacccagggtagaatatagtggtgtgatcttggcacactgcagcgtcaacctcctaaattcaagcgattctcctccgtaagacccccaagtagctgggcatacagatgtgggccaccacgcctggctatgtttgtttgttttttgtagagatggagtttccccatgttgcccaggctggtctcgacctcctgggctcaagcaatacacacatttggcctcccaaagtgctggggattacaggcatgaaccaccggctttttttttttttttttgagacggggtctcactctgtcacttaggctgagtgcagtggcacaatcattgctcactgcaaccttgacctcccaggctccagggatcctccacctcagcctcctgagtagctaggatcacaggcacaagccaccacacccaactaaattttttattttttgtagagacaaggtctcactatgttgcccaggctggtcttgaactcctggactcaagggatcctcctgcctccacctcccaaagtgctgagattataggtgtgagtcactgtgcacagccaagactgta[136 bp omitted]ctgcctcagcctcccgagtagctgggacgacaggactacaccacgcctggctaattttttgtatctttagtagagacagggtttcaccg[139 bp omitted]cttgcccaaggttccacaggcaggatttggggcctgtgcagtctcagagactctgccctgagagaccctgccctgacccaggacttccctccaggtgtggatgacactgtcacggtgctcctgcagtacccaggggaggtccatggcagcttcacctgcagcatcaccgtgcagctctccaacacggcctccgtgagcggcaccaagggcatggtacaggtgaggcatggcgggcccaagcgctggggatcgtgcccctaaaataggagggggacaaatggcctctggagctagatgagagcttaaccagccaatttcacatcattgctaaagagttcctccttaaccaagccaagaggtgggttctgggcctctaggctctccttacttaggatgaacctattgctctgtcaaatattcttgggcctggctggcacggtggctcacgtctgtaatcccagcactttgggaggccaaggcaggcagatcacctgaggtcaggagttccagaccagcctggacaacatggtgaaacgccatctctactaaaaatacaaaaattagctgggtgtggtggtgggcgcctgtaatcccagctactagggaggctgaggcaggagaattgcttgaatccggaagatggaggttgcagtgagttgagattacgccattacattccagcctgggtgataagagcaaaactccatctcaaaaaaaaaaatatatatatatatatgtatccttgggcctggccggcacggtggtcacacctataatcccagcactttggaggctgaagctggtggatcacttgagccctggaggtcgaggctgcagtgagctgtgattgtgccactggactccagcctgagtgacagagtgagatcctgtctcaaatatctatctttagtcctgaggagaagccagttattatcaaccatgcttagtgggcagttgtgaatttcggaagtgcatccgggggaggatctgggtgttaccaaaggtcagcttaactggtcttcctggggccttgttgctagaaaaaaaaaaaaccctattttatagccaggcatggtgacttacacctgtaatcccagcgtgattgggaggccaaggcaggcagatcacttgagctcaggaattcaagactggcctggccaacatggtgaaaccccgtctctactaaaaaaaacatacaggctgggcgcggtggctcacacctgtaatcccagcactttggcagcccagagcgggtggatcacctgaagtcaggtatttgtgaccagcctgaccaacatgatgaaaccctgtctctactaaaaatgcaaaaattagccaagtgtggtggtgcatgcctgtaatcccagctactcaggaggctgaggcaggagaattgcctgaacccgagaggcggaggttgcagtgacccgagatcgagccattgcactccaggctgggcaacaagagcgaaactccgtctcacaaaaaaaaaaaaaaaaattagtcaggcatggtagtgggcacctgtaatcccagctactcgggaggctgaggcag[136 bp omitted]catggttcacagacacacaaagataagccctcctctctagaccttaagaacaccttgtttctaagctcctaaggttagggagaggtttgctcctggggagacagacaggatttttgtgtcacatcagcgttgctaaggaacaaacttctagcaactagaaatgaaggagggtccaaagctccccggggatggacagggcaagctcttagccaccaggttcaagagggaggcccctgtgcaccacctggcatgttcctggaggcagcctcagcagcaccgttggtgaaggcagcagtgccacttcttctctccctccagctcctcaacccctgctggtgcccgaccgagctggtggtgaagggggagcataaggagttcccgctgcccccagtcccaaaggactgcaattttgacaacggggcaggcatgagttatgaggccaagcacgtctgggagtgcctacgcaagggtaaggatatggatgcggggcaggcgccaggcctggtagggggatgttgggcccctccccacctgctctgtcaccctgctgtttagaactacatctcccaggaggttgcagtgagccgagattgcaccactgcactccagcctgggcaacggaacaagactctcactccaaaaaaagaactatatctctcaggaacccctgcagcatccatctgcctgaaccatgtatattgtgccacatggaattctgggaattgtagttctttgggtcttgggcgcgtgggtaggaggggtccctaactacactctccccacaggtatgaaggaaagtcctgtgattcccctgtcggaaagtgagctcctggctgacatccttgaagaggtgaggaaggccattggagtcaccttcccccaagacaaacgctgatgtatccccgaataaataaagacatcttacatcttcgtggtagtggtttggcagaagctggagaacccagtat[132 bp omitted]tgaaaccccatctctactaaaaatacaaaattagccgggcataatgacgcatgcctgtaatcccagctacttgggaggctgaggcgggagaatcacttgaacctgggaggcggaggttgcggtgagccgagatcgtgccattgcactccagcctgggcaacaagagcgaaactctatctcaaagaaaaaaaaaagaaagaaaaaaaaaataattcgggcagaatgatgagggaaggccgggcatggtggctcacacctgtaatctcagcacttcgagaggccaaggtgggagacttgcttgaggccaggatttcgagaccagcctgggtaacatgacaggaccttgtctctacaaaaaataaaaatattatccaggcatggtggcccgcacctgtagtcccacctacttgggaggctgaagtgggaggactgcttgagtccaggaggttgaaactgccgtgagtcatgattgcaccactgcacttcagcctgggtgacagagacagacccagtctcaaaaaaaaaagaatgattttggagagggaggaatgtgcagggtcaggaccacattcccagaagctcctggcacagacacctgtgggaagatccaccgtttgcctgtcacggcctctctggggtttgaccctcattgccttggagtgacttttgcaaaacaacttgatttctcacctcaaaaatcagtctttttctggactcctgaaagccacccagcttttgttcttgttgctcttcctgcctgtaattgtctctccttgaattcaatatagtagtcaggctgttcctttggacagtgtcagaaacacaactcagaatgtctccacaaggccaggcatgggggtcacagcactttgggaggctgagacaggaggaccacgtgaggccaggagtttgagaccaggctgggcaacatagtgagaccccgtctcttaaaaaaaaaaaaaaaaaaaagcctgcacaggaatggaatgcttggtaattaaagccttcagggcagggcaggcatcagcccaggactctgtttttctctatctctttgactttccttggcatgggttttaatggcagcagtgggccatctggtacagccggggccatcatgctggctgctgccgggagggcacagaaaagagatggacagaccctcacccctgcagtccgctgcccggggggctgcccccacagagctgggccgggttttgtgccaggtgagggggagctccaggccgtctctgagtgccagggtcacaggaggagctcacagccatgttgcttcggcccccgatgccagcccagtcctagtaaggacccagagctcccacccctggctgcacatgggtacagtcaggtgccatgcttcatggagctggcaggagctggggacacacgggagccctgccccttccaagatcaggagggtgagagctccgcaggagcaactgcagctgcccaggccgtggctgcaatccagacacccccgtgctattgggagctgggagtagacaggagccacacccagttgtgtctatggatgtggatgtgggcctcctgctctacagagcaggcaggagccccgccccccaaggcacagctgcagcccccaaaccggggctgtagacccaggcatccctgcactcctgagaggcctggaaaggcctcccttgtccttgtaggctcagaggtgcctgctaccactgcctggcctctccccactccctctcttgctctgatctcagagtggggttggggctgagcccaggtgctgacattgtccaccaggtgtgcacatgctcagggtagtgctaacatgtgcgagcactctgccaccttggcctcctccagacattgggtgccgaggagcacaagaggggaacctgagggggtgctaagggtggctgggtgctggcgtgaaggtgccccttggtgccagcagcctgggcaccatggatggccatgggaggcagacaggctcctgggcagaagggggcaggtccccagtgaagccccaccttcaggccaggcaggtttgaagcctgggggccagggtgccagtcctgtggactgaagggggaactcatggtgctttttcctgggcccacccatcctgccatggaccaataagcatgcacttcccctctgtgaggcccataaaagccccaggctcagccagagccagcagaggacagagagacaacaggatgaccagctacagagcggagctaccctctccagggctcctctctactgagagctgagcacttggtgggacaacctgcctacagagaagaactacccactgcgggtctcccctgagctgttgtaatactcaataaagctcctgtttgtctttttcacccttccgttgtctgcatacctcattcttcctggacacaggacaagaactagggcaaaggcaccaccagccacagaggtttctggccagaaaagcaacaccccaaagatcctgtaacagtttcaccagttaagtgtaggcctgggcactggagccagatggtgcctgtgacctcaggaaactaatagcgtgtgggtaggaagtgtccctaaatacactctcccccagcctctgtttgtctcttcatcagtaaaggggtact[226 bp omitted]ctgaggcaggagaatggcatgaacctgggagtcggagtttgctgtgagccaagatcacgccactgcactccagcctgggtgacacagtgagactccatctcaaaaaaaaaaaaaaaatgagaaggtgactgatatgtagtttggatctgagtccctgcccaaatcccatcttgaaatttaatttccagttttggaggcagggcctggtacaaggtgattggctcatgggggtggctttctcgtgaatggtttagcaccatcaccttggtatcaccctcacgacagtgagttctctcgagatctggtcatttgaaaatgtgtagtgttgggaatagacccccaaaatctggccataaactggccccaaaactggccataaacaaaatctctgcagcactgtgacatgtttgtgatggccatgacgcccatgccggaaggctgtgggtttactggaatgagggcaaggaatccctggccgacccagggtggaaaactgcttcaaggcgttcttaaaccacaaaaaatagcatgactgatctgtgccttcaggacatgttcctgctgcagataactagccagagcccatccctttatttcggcccatccctttgtttcccataaggaatactttcagttaatctataatctgtagaaacaatgcttatcactggcttactgtcaaaaaatctctgttcgaggctctcagctctgaaggctgtgagacccctgatttcccactccacacctctatatttctgtgtgtgtgtctttaattcctctagcgccactgggttagggtctccccaaccgagctggtcttggcagtgtagcaccttccccactctctcctgctccttctcccgccttgtgagatgcttgttcccccttcaccttctgccatgactggaagcttcctgaggcctccccagaagcagaagcctgtgttacacttgctgtacacagtctgcagaaccatgagccaattaaacctcatttttttttttttttttgagatgaagtctcactctgtggcccagggtggagtgcagtggcacgatctcacctcaccgcaacctctgcttcccaggttcaagtgattcttttgcttagcctcccaagtagctaggattacaggtgtgcaccactgcacacggctaatttttttttgtcttgaactcctgacgttaggtaacctgcctgccttggcaaatccaaagtactaggattacaggtgtgagccactgtgcccagcaaacctcttttgtttataaattacccagcctctgtcaggtgcagtggctcatgcctgtaatttgagcattttgggaagctgaggtgggcagatcacttgaggtcaagagttcaagaccaacctggccaacatggtgaaatcccgtctctactaaaaatacaaaaattaggccgggcacagtggctcacacctgtaatcccagcacttcgggaggccaaggcgggcagaccacctgagatcaggagttctagccagcttggccaacatggtgaaaccccatctctactaaaaatacaaaaatcacctgggcatggtggtgcatgcctgtaatcccagctactcgggaggctgagacagcagagatctcttgaacctgggaggcggaggttgcagtgagccaagattgcaccactccactccagcctgggtgaaagaaaaaagaaattaatgggtggcttagctgggtggttccagctcagggtctccctgaaaattgcagtcatgacatcagtcaggactatcttcacctgaaagcttgactggggctgaagaatccctttccaaaatgattaactcacctggccagaggacttggtttcctgccacccgtgtttcgccagagtatgactgcttgagtgtcctcactgtcacacgtgtccgtgcaaagagaccacctaacagactttgtgtgagcaacaaggctgtttatttcacctgggtgcaggtgggctgagtctgaaaagggagtcagcaaagggtggtgggattatcattagttcttataggtttgggataggtgtacaaattacattctcaagagtggggagaatattgcaaagtaccttcttaagtggggtggaggggagaatatatcatatcagttagagtggggcaggaacaaatcaccatggtggaatgtcatcagttaaggctattttcacttcttttgtggatcttcagttgcttccggccatctggatgtgtacgtgcaggtcacaggggatatgacggcttagcttgggctcagaggcctgacactcaccacatggcagctggctttccttaaaggaagtgatctgaaagggaacaaggtggaagctgtagtggcttttctgacctgtcctgtgaaatcacactctgtcatttccacaatatcctcttggtcacactgtttagccctattgagtgtgggcagagaccacacagcagcatgaatacctggaggtgtgactcctcaggtgccatcttggatgtg[143 bp omitted]ggcaaaagcctatctctaataaaaatatcaaaattagcagggcgttgtcacacgcctatagtcccagctactcaggaggctgaggcaggagaatcacttgaacccggaggcggaggttgcagtgaactgagatcacaccactgcactccagcctggcgacagagcaagactccgtctcaaaaaacaaaacaaagcaaaacaaaacaaaacacacaaaaaagagttttagtcaggcacagtgacgcatgcctgtagtcccagcactgtgggaaactgaggcaggtggctcacttgagcccaggggtttgagaccagcctgggcaacatggcaaaaccctctccctacaaaacatacaaaattagcagtgcatagtggcacacacgtgtagtcccagctactccagaagctgaggtgggaggatcccttgagcccaggaggtcgaggtggcagtgagccacagttgtgtcattgcactccagcctggacgacagagggagatcctgtctcaaaataaataaataaaaataaaaataaacagttttgacttcacaactagctaaaaagtgtattccctcactcagtgactgtactgttcagaggtgtatacctgcattaaaagccctttccttccttctctgtaactggagtagggaagggctatctcattggactggagtaacacacacagataaagccggatgcaaagttaacaggaaacactatttctctcaaggatacgctttgtttgttttttttttgagatgaagtctcgctctgtcacccgaggtggagtgcaatggcacgatctctgctcactgcagcctctgcctcctgggttcaagtgattctctggcctcagcctcccaagtagctgggattacaggagcacaccagtacgcccagctaatttttgtatttttagtagagacagggtttcaccatgttggccaggctggtctcaaactcctgacctcaggtgatctgcctgtcttggcctcccaaagtggtgggatttcaggtgtgagccaccacgctggccaaggacatggtttcttacagagactttgttctctaaattcataaattgttggaaattctatcagtaaaaatgaaacatccgagtcttgctgacaggatctaatccacttgatacagagtagcagccttgatttccaaagcaggtgcacagcttcagataaagggtttctggatgcaacatttcacatgtaccttcttgtttccagcgattcaggacactggtttcacttcacagtcctgatccaatgttgaccttgctttgctctaagctatcatttggttgtcacctaagctctaccctccccctttatcttggctttttcttttcttttttctttttgagacaggctcttcctctgtcacccagtctgattgcagtgatgcaattgatcacagctcacggcagccgggacctcccaagctcaaacaatcttcccacctcagcctcccaagtagctgggactacaggcacgcaccaccacatccagctaattttcttttttttctgcttccttttctttttgtttttttttagatagaggcttgctctgttgcccaggctggggtgcagtggcacgatcttggctcactgcaacctctgcctcttgggttcaagcgattctcctgcctcagcctcccaagcagctgggactgcaggcacgcgccaccactcccagctaatttttttgtatttttagtggagacggggtttcgccatgttggctaggctggtcacaaactcctgacctcagatgatacacccacttcggcctcccacacagctggtattacaggtgtgagctaccacgcccggccccccctcctttcttttgttttttagttgacacagggtctcaccatggtacagcccaggctggtcctgaactcctggcttcaggtgatcctcctgccttggcctcccaaagtgctgggactataggaatgagccatcacacctggcccctttcttcaattttcaaaacaaactgatccttcaaggtcaagaggaaatacctcctctgagaagtcttctctgaatgtcagaggcagacaatgtctgatttctgcatgctccccaacattcaatcatacagttattgaataacacattttgagagataactatgaatcaagtaacatgctggtttctgggagaattgaggacaaattaaccttgtggaaattttgggtggatgaaaaaaaccaacatgaaattaaaacactgcacacatttacagctgtgagaagcattacacatcctgggtgctatgcgagctttttttttttttttttttttttttgagttggagtttccctcttgttactgaggctggagtgcaaggtcacgatctcagctcactgcaacctctgcctccagattcaaacgattcccctgcctcagctcccgagtagctgggactacaggtgcctgccaccacacctggctaatttagaatttttagtagggatagggtttcaccgtgttggccaggctggtctcaaactcctgacctcaggtgatctacccatctcggcctcccaaagtgctgggattacagaagtgagccactgagcccaaccaggagctttttcgagaaagaaggaagtccaagagatcttcctgacaccctagtctgactctgccctttgcctgctcaaaatttccccatgcttcccagcggccttctggacatagatcaagtcccttctctgacaggcccaaaccctttatcatctgatcctagctcatttttctgagttttccttagttgctattattttctgtctaaagtgacatgtcataatattcataaagcacacaagtctt[142 bp omitted]gaaaccccatctttactaaaaatacaaaattagctgggcgtggtgtcgcatgcctgcaattccagctacttgggaggctgaggcaggagaattgcttgaacccggaggcagaggttgcagtaagccgagatcgtgccattgcactccatcctgggcaacaagagcaaaactccgtctcaaaataataataataataataataataataataataataatgtgtatacccatgtaaacaccattcagataaaaatatggcatatttggggcacccggggagtgtctcttgtggcccctcccctccataccctgctgatctatcagcacagattagtttctgccactttttaaacttcatattccttttctttttacacaaacacaaacattcgagtcatgactgggtggggtggctcaagcctgtaatctcagcactttgggaggccaaggtgcgaggatcgcttgagtctgggagttcagagaccagcctgggcaacatagagagacctcatctccacataaaaagttttaaaaattaaccaggggcggtgtagtcccagctactcaggaggctgaggtgggaggcttcagcccgggaattccagactgcagtgagccatgattgggccactgcactccagcctgggcaacacagtgagaccctgtctcaaaaaaaaaaaaaaaaaaaacaggaaaaaacaaacaaacagaaaagcaggcctggcgcggtagctcatgcctgtaatcccagcgctttggaaggctgagacggggttatctcttgggctcacaagttagagacaagcctgggcgtgggctatattgctagatccaggtctctgcaaaaaacaaaaccactcagtttttagtcatctataacgtcctgcctggaagcatgctattttgggcctctgagcttttgcacttgctaattccttctgcgctggggagagctcaaaccctgcccgaaacttctaaaaatggtgcctggataaatgaaggcattagagctgcgattggacggacggctgttggacggcgccactgctggcacttatcgggagatgctcattggacagtcacgtgacgggaccaaacctcccgagggagcgaggcaggtgcggtcacgtgacccggcggcgctgcggggcagcggccattttgcggggcggccacgtgaaggacgcacgttcagcggggctctcacgtgacccgggcgcgctgcggccgcccgcgcggacccggcgagaggcggcggcgggagcggcggtgatggacgggtccggggagcagcccagaggcgggggtgaggcgggaggcagacgggcgggaggagggcgagccccctcgccggcccgtccgggatccttcctaccggcctggggctgtgcgatctccaagcactgaggggcagaaactcccggatcgggcgctgccagcctccagtcccctccgtcctcggaggttcctggctctctgatccccgtgtcccgatccctgcctctctggcgctctcggaccctcgagaaccaggggatctcggaagccaagcccccgggcaggcccgggcttgtcgcccgcaccacttcctgcctctggcactggtgggaggggcgggtctcgcctctgccccctcaggccaggggtctggatgcatatagcgttcccctagcctctttccccggggagaatgtaggatacaggcccagcctcctggcctttctccatcagggactcagttgtctgggcccccccgtcactttatctgctagggtcccagaagtccagggtccccagctctgtcctccctcaggggccgtgagtctccacagtctcctgatcccctagaacccaagagtccaggtacctcttcccttcctttctcctctagggcccaccagctctgagcagatcatgaagacaggggcccttttgcttcaggggtgagtttgaggtctgattattgtggcacagatttgaggagtgacaccccgttctgattctgcaccctcactccatccccactctagtttcatccaggatcgagcagggcgaatggggggggaggcacccgagctggccctggacccggtgcctcaggatgcgtccaccaagaagctgagcgagtgtctcaagcgcatcggggacgaactggacagtaacatggagctgcagaggtgtgggcccctgaggacccagaagtccagccactgggctccttcaggacacaggactctcagccccgcattctcctcctcccctaagaactaggagtctgggccccacaactcagcgcaaacattccggactcccagccctcctctctgccaggatcttaaaaccctccttcagggagtcatttttcccaccttcctaaatgtctgtcttgtccccttcccttgtcccccgttggcctgttgcttttcatttcagcctggcttggggctcagtctccttatctttagtgtgcggtggatgcgggaattttccaccatcagcctgatgcctgctccccggcactggttctcctctctcctgcaggatgattgccgccgtggacacagactccccccgagaggtctttttccgagtggcagctgacatgttttctgacggcaacttcaactggggccgggttgtcgcccttttctactttgccagcaaactggtgctcaaggtgggcagctgcagggcagtgagcccagggatgctccccctcagatctgtgaggacctggggatcgtggtatcaaccccctgcagtggcccagtgaccacagagggcatggagagagatggctgtgcactgggtgtctgctccttcttttattcattcaacaagcatttactggacctgctatgtgccaggcctatacctggcacctgggacacagcactgtacaaagcaggctacatccctgctctcagggagttcacgtgcaggggtgaagtaaagtgggcagtgtgatttagcagagtggtcaggaaagatttctattttttttttttttttttttgagatggagttttgctcttgttgcccaggcttgagtgcaatggcatgatcttggttcactgcaacctctgcctcccaggttcaagcgattctcctgcctcagcttcctgagtagctgggattatgggtgtgcaccattatccctggctttttttttttttttttttttttttgtatttttagtagagacgggtttcaccatgttggtcaggctggtcttgaactcctgacctcaagtgatccacctgccttggcctcccaaagtgctgggattacaggcatgagccaccgcaacaagccaggaaagacttctaagggcaggtgacatcaaagagcaggtgacattaaagccaaagctagaatgataagaagcatgcagtgatctatagtgatcggggggaagaggcatctggtagagggaacagcaagtgcaaaggccctgaggtaggaccaagcctcatcttttgacagtagggaggaggccagtgctgttggaacagagtgaactggggagagggtgggaaaggaaggcacagttgggcaggg[138 bp omitted]cctctgcctcccgggttcaagtgactctcatgctttagcctcccaagtagctagaattacaggcacacaccaccatgcctggctagtttttgtatttttagtagagacggagtttcgccat[132 bp omitted]gagtgattggctggttttaaatacggaagcgacaagacctgatttataactttaagagattattctagcaagtatagatgccccttgacttgcaatggtgttacatcctagtaatcccatcataaattgaaaataacataagttgaaaatgcattcaatgccccgataaacccatagtaaggtcaaaattgtaagtcaaaccgtcataagttggggactgtctgtatagcaaaatgttaattgtagaatctaattataggtggcggctatatggcttttaactgtgaaattcttttaacttttcattatgaagattctcataagaaaatgtggtgggggtggtggtgaaatgctcctggctgttgttggccaaaagagatcatgaggcacaagggcagaagcgaggatcctggagaggtggcacctgtcatagtcttgctgaaagatgacaagccctggtggtagcagcagaggtgcggggggggcatttttttttttaagaggtagggtcttgctctgttggccaggctggagtgcagtagtgatcatagctcactgcagcctcaaaccgctggggtcaagcagttctctcgcctcagtctccagagtagctgagactacaggagcatgccaccacgccccactaactgttgcattagtctttttctatagagacggggtctcgctatgttgtccaggctggtctccaacagggagggatatttctttttggaagatttttttttttttttttttttttttttgatacagggtctcgctctgttaccaaggctggaatgcagtggcatgaccttggctcactgcagtctccacctcctgggttcaagcaattctacctcagcctcctgagaagctgggattacaggctctccccaccacaccagcaaatgggagggatatttctttctttctttcttttttttttttcctgagacggagtctctctcggttgcacccaggctggagtgcagtggcgcgatctcagctcactgcaacctccacctcctgggtttaagcgattctcttgcctcagtctcccgagtagcttgggattacaggcgtccgccaccacacccagctaatttttgcatttttagtagagatggggtttcaccatgtt[136 bp omitted]ggggcctgaacgtccgagatgaggggaatagcagtgcaggtgatggtggcaccacctacagagcggggatgatagaatagaagtggccagataaaggctgcaggagaagtcttgggagttgggagagcaggtcggggtccatg[222 bp omitted]gaggcagaagaatggcgtgaactgggaggcggagtttgcagtgagctgagattgcaccactgcactccagcctggagcgacagagtgagactccgtctcaaaaaaaaaaaaaaaaaaaaaagaaaagtcctctctggggaagtgacatttgccctgagagctgaagggtaagaatttgcttcgtcgaggcctgtttaggcggaaacaggagtacatgaagaagtcccgaggcaggaagaatttgatgggaatttaaaaaattaaaaaaaaaaaaaaaaatggggctgggcatggtggctcacacctgtaatcccggcactttgggaggctgaggcatgcggatcacctaaggccaggagtttgagaccagcctgaccaacatggtgaaaccttgtctgcactaaaaattcaaaaaaaaaaaaaaaaatagcccggtgtggtggcggatgcctgtaataccagctgcttaggaggctcaggcaggaggatcacttaaatctgggaggcggaggttgcaatgagccgagactgcactattgtactccagcctgggcaacaagatcaaaactctatctcaaaaaaaaaaaaaaaaattagccaggcatgttggcaggcacctgtaatcccaaccctttgggaggctggggcaggagaattgcttgaacccagaaggcaaagctttcagtgagccgagattgcgccactgcactccatcctgggtgtcagagcaagactccatcttaaaaaaaaaaaatggaagcagctcagcgaggcacaaaacaggaagtggaaaggtggagtgaggtcaggccaaagcctgcacacagggcttgtgggctgcactgtgccttcgggtcttcatcctgagggtactggggagccacagaaggctcaggggtggggcagttgagagtaacattatcttgtttacaattttattttttttatttatttattttttgagacggattcttgctctattgtccaggctggcgtgaaatggcgtgatctgggctcactgcaacctctgcctcctgggttcaagcgattcacctgcctcagcatcccaaggagctgggattacaggtgcctgccaccacacccagctaatttttgtatttatttattttgagatggagttttgctcttgttgcccaggctggagtgcaatggcgcaacctcggctcactgcaacctccgcctcccgggttcaagcaattctcctgcctcagactcccaagtagctgggattacaggcatgtgccaccacgcccggctaattttgtatttttagtagagatggcattactccgtattggtcaggctggtcttgaactcccgacctcaagtgatccgcctgccttggcctcccaaagtgctgggattacaggcatgagccgccgcacctggccatgtttacaatttttgaagccgacttcaattgtgggtggcagaaatctttgaggggaggcaaagaattgacaaaggaggtttggggccactatctccaggcagtggggacaaggttcagtccctaacgcccactccactccccacaggccctgtgcaccaaggtgccggaactgatcagaaccatcatgggctggacattggacttcctccgggagcggctgttgggctggatccaagaccagggtggttgggtgagactcctcaagcctcctcacccccaccaccgcgccctcaccaccgcccctgccccaccgtccctgccccccgccactcctctgggaccctgggccttctggagcaggtcacagtggtgccctctccccatcttcagatcatcagatgtggtctataatgcgttttccttacgtgtctgatcaatccccgattcatctaccctgctgacctcccagtgacccctgacctcactgtgaccttgacttgattagtgccttctgccctccctggagcctccactgcctctggaattgctcaagttcattgatgaccctctgaccctagctctttcctttttttttttttccccactgagaaggggtctcgctatgttgcccaggttggtctcgaactcctggcctcaagcgatcctcccgcctcagcctctcaaagtgctgggattacaggtgtgagccaccatgcctggcctgagtccagctctttaatgcccgttcatctcagtcccctgcccgcaatcctgccttctggcctcctccgtccctgatcccgcctctgcctgcccaggggctgcccctggccgagtcactgaagcgactgatgtccctgtctccaggacggcctcctctcctactttgggacgcccacgtggcagaccgtgaccatctttgtggcgggagtgctcaccgcctcactcaccatctggaagaagatgggctgaggcccccagctgccttggactgtgtttttcctccataaattatggcatttttctgggaggggtggggattgggggacgtgggcatttttcttacttttgtaattattggggggtgtggggaagagtggtcttgagggggtaataaacctccttcgggacacacttcggcatctgagtcactgggcctctgccccgctccccggcacgtcaggagagcaggccctgtccgctgccccacgccgggcccgccgtctgctggcctagagatacctgcttgggccactcagggacgtggggctctctgcactcacttgacatctttttctggggtgccctgtggggtctgtgggttagggatgagttggtcctgggcctgacctgcaggagctcacgggaaaggaaaagaagggagctcacgggaaaggaaaagggagctcacgggaaacgagggtgataggtggtacatctgtcgcagcccaggatgatctgtgcgggacagaggcagcggcctgtgaggcccaagcaggcgtgtgggtaagggaagaacagcacggccggctgcagagcaagcctcctcggcccggggaccacagcctggcgtgtcacacgtgggacctcaggaggccatacctttaccgagctggagaatgggagtggggggaggagggatgggaggaccagaggagcaggaagggctctggagcctggtggtgaggtcgctggagggtggcaggctgaggacaccagggcgagggcccacgggagaggcctcctgagctgggctgaggacagagaggaagggacctggctggcgactgagaggctggagggcagggcagaggaggaggaacctggtctggccccacagctgggtggggcccccctggagaggaactgccggaagaaggtgctgagctcagaggcccagtgaccttagacacaggcggagcgaagacaagggggctagaggatgtgggttctcagtcacagggtctctggcacccccctctgggtctttaccccctcccatctctgggtctctgtccccatgctctgggtctttgctttccgagcctctgttcccaccccacctttggccctctttctctgggcctctttccacccctggcacccagacctctggccccctctctctgggtctctgtccccccctctggatctctggccccccatctctctctgggtctgtcccccgaccctgagtttctgtctccctctctctgggtctctgtcctctctctggctgtcactctctcttgggtctctgtacctcccctctctctgggtctctttccctctccccggtctctgtcccccgcccccgggtccctgtccccgcccccccaggtctcagtcctccctagtctctgtccccttctctctgagtccctgtcccccctctctctgggtctctgtacccccttctctggatctctgtccccacctctctctggatctctgtcccccactctggatttctgtcccctcccgccgggtccctctgggtctctatcccccccacccctgggtctctgtacctccctgcctctgtccccccccacctctgtccccccctctctctgggtctcttttcccctccctctgggtctctgccctcctctctctaggtctgtccccctcccctctctctcagggtctctgtacccctctgtctccgggtctgttttcccctctctctgggtctctgtccccctctctctcagggtctctgtctgagtctctttttctctgggcctctgtctccccaccccacgttctctatggtcttcagatcctgtctctctcagcccctcctctccctccacctatgggccccaaggcccctctcggccgactaaaggtctctgggctgaggtatgacatttggtaaatgagtaactcgggccccacagtcaacggggtgctttggacggctgcccctcctccatggactcttcccagagaccccaagtcaggggagagagaggggcagaggatcaatgagtgtacactgagccaccacccagagtgaggggacaatatggccacaggcaggatcccagaaaaaaaaaaattatgggaaccaaaaagacacggagacaaagcacacagccggcttccaacaaggggggaccttggggtagggggcccgatttgggtctgagccaggtctagttctgagggtcccaccaaaaaagtcggggagtgccaaggggatgaggtcagcgagtggccccacccccatccgtccccgcgggggccccttcccgcgctgagctcagcatgactcagcagtcgctgcctgcaacaaggaccccagataccggcctggcggggcatctgcagatcccctcggtcaggggctgccccgcctgggctgttcggagcagctcctctgtagggcagggcctgacctcaccccacaccccagtggcttcagctccctgcccagcgcacgggctgcctccatcagggcacttaagtagagtcaaggtttgcgccgactccgtctcccagaaatcaacgtggaccaggcccacttaaaaaatatgcattagtcgaagacagacgtctcgtccataggtccccagactgtttgtccacaacgcagggcttctctttgtgggcctgaaggagcacacgtcaggcaagacacgagggcaacttcagagacactgttcagggccacggagaattctcgaagtctgtgagttgtctccaaaacagcctccaggaaatgcaatcccagagacaccgcaaagctcaaaacagacttttcattcctccccatttccactcccagaaaaagcctgggcccctgaaagagctccaaggtatccccaaagtcccagcccatctttggagggttccagagggctgtccagggttccagaagtcaccctacctcatacaatgctcctcctgggcttcccgcactgggtgaaacccacggctccagaataactgccctttccaacttgcagagcacctcaagaacctaaagatttccccggggagggctccaaaatatagagagtttgcatcgtgaacccccacccctgtaaatcccaggactccagtccccgcaacactccatcttccagagatctccaggggtccagaaataacacctcacagccttccaagcttcccaaggatccggagactccttatctcgcagcgcaaacctcaggcaactacaggtcctccctgcacctttgaggtgcccctccccccactcaaggttccagaaaaatccatgccctcggaaaccccagaatcttactttcccgaggcaccccaggaccccagggtcatcagttcacagggctgttagtgctcccataaaactctagcctcccagagggaccccagcccccaccctcccgcccacgaacccctgcatttccagaatcagccccagggccccaacccccccaagcccccatttcacaacacgctggcgctacaggcgcgtgacttccccttgctttggggcggggggctgagactcctatgtgctccggattggtcaggcacggccttcggccccgcctcctgccaccgcagattggccgctagccctccccgagcgccctgcctccgagggccggcgcaccataaaagaagccgccctagccacgtcccctcgcagttcggcggtcccgcgggtctgtctcttgcttcaacagtgtttggacggaacagatccggggactctcttccagcctccgaccgccctccgatttcctctccgcttgcaacctccgggaccatcttctcggccatctcctgcttctgggacctgccagcaccgtttttgtggttagctccttcttgccaaccaaccatgagctcccagattcgtcagaattattccaccgacgtggaggcagccgtcaacagcctggtcaatttgtacctgcaggcctcctacacctacctctctctggtgagtccccaggacgcccctggccctaatttcctccagctgcgcacctccggccctcactgcacgcgccagccttctttgtgcggtcgggtaaacagagggcggagtccccttggcctcgcctcccgctaaccattgttgcctccatctcttcccgtagggcttctatttcgaccgcgatgatgtggctctggaaggcgtgagccacttcttccgcgaattggccgaggagaagcgcgagggctacgagcgtctcctgaagatgcaaaaccagcgtggcggccgcgctctcttccaggacatcaaggtaactagtgtgtgggtaatggactacatctcccagcaggccgtgcgcgcgaggagccttgatttgagggcgtaggtgtcgcgtgggcttctgggagattgagttcggtcttgtgagccctcttaaccgctggaaatagaggcgcacctcgtgcagtgcccacaacacgcggcagtccacaccgctgcgtggtcttagggacgtatagctgtaagagctaggacagggtgcggagagtgataaatacaagctgtcacatgtctttgtggcctgggcctctgacccccaacgactcttgggaaatgtaggtttagttctatgtgccgagtgtgtgtattctgagccatttctcccttctatatagaagccagctgaagatgagtggggtaaaaccccagacgccatgaaagctgccatggccctggagaaaaagctgaaccaggcccttttggatcttcatgccctgggttctgcccgcacggacccccatgtacgtacccgctgcatccatggctacccaaccatacccctcaagcctctgctccctttgggcaaatttccttcagagcctcatttcacacctgtcacattttaatctgcaactggctgctctctccccctcttttccagggattgggtttctaatttctccctcttctctctcagctctgtgacttcctggagactcacttcctagatgaggaagtgaagcttatcaagaagatgggtgaccacctgaccaacctccacaggctgggtggcccggaggctgggctgggcgagtatctcttcgaaaggctcactctcaagcacgactaagagccttctgagcccagcgacttctgaagggccccttgcaaagtaatagggcttctgcctaagcctctccctccagccaataggcagctttcttaactatcctaacaagccttggaccaaatggaaataaagctttttgatgcagctggtggttttgtgtgtggtgtggaagatgaggtgggatctgttctcataaagcttctggctgggttgggatgccagtgaaagaggagttggccccatctcccattttcttaactgtcctaagacaagaggctatctgggtagtgttgaacctgagggttctctgcttgcctggctgttaactgtccctcccagatggtagagatagactccagggagttgaattaagacctaggttggtatctagaaacagatgttaggtctcagccagaaacagccctatttaacgagtgattatggggccaggtgggtcgctcacctgatgtcaggagttcgagaccagcctgaccaacatgaagaaaccccgtctctactaaaatacaaaattagctgggtgtggtggctcatacctgtaatcccagctagtcaggaggttgaggtaggagaatcgcttgaatctgggaggcggaggttgcagtgagctgagatggcgtcattgcactccagcctgggcaaaaagagtggaactcccatctcaaacaaaaaacatgtctgcctcacggaagttgcggtgagctgagatggcgccactgtgctccagcttgggcaacagagtaagactctgtctcaaaaaagaaaaaagcctcaattctgggaggcagttggaattattaggccctttatatgggcacattgacgctattgctatgcaacttgcatggcaaccggggggctcactgaggtctttgctccagagtttaagagattatggcccgagcttgagtgatcccaatgtgaggcgcacactgagaggaactggccagtggagctgagcagccaggaacacgtgatgcccaagcaatgctggacaaggggtttagggttcatcacagaaatgggatgtgaaaccttgggccggattctccaaatgggaactgaagaagcttaaaacaggccttaaaaagcacttgctgtgtccaagctgcaaaactgctgtgtcagctctgactcttccccttctccttcccctgggtctggggcagggtggttcaagcctgtaatcccagcactttgggaggccaaggcaggacgatcacttgagcccaggaggttgagaccagcctaagcaacatagggagaccccccaagtctctctagaataagaggatgagctcagaccagggaaggggtggtactggggggacgtcacagccaggcccaccaagtgtcatgtctgaccacacctgggattcttaaatatagatgtatttttttcatctcatctccggacacactccaatcacacccctcctgccctcccctctcaactgcaaaccaagcggtgcagacacagcacagcacacatgaggggccctccctttcaccaaagctgaaggcagggcacagtttggggatggaagagcctcgaggtaaatgtgggggttctagaacccagtgacctcagttctggatcatgggaaagggatcagtatgcagtaacgtggtaaggttccagatctagaagccaggacctagaacctagtggtttcacagtgggcagagcagttgggaataagccaggttaggggtgggggaagacagccagctctgtcctctgcaggcggattccctggagggagatctcagatttagaaaggaagagtaggatctggtccagaaagggccagaaagacaggaaggcatctggactgagactgtgtgtcctccagaaggaatgagcagccaagtggttctaccacctcttgcttggccaaagtgtaggggatgacaggagccggatggagggatcctccaggcagagcctggctctgacatgccagggagggctagaacatccctcccagagccccacttctggagttgaaatggaggaccatctgctctcagttaccttcaaactctgaaagtgccccggctctggacttgatcgccccattcgcagggacaccacgtggtttccagaacttggtggcccgcatgccgggcctgagcgtggcctgctctgtatgctgtagaatttgtaagccacacggggggctctaaaagccccagacctgaaagcaccatgccaggtttcctaaaacctctggcaccaccgcagagtaatggcagattcctggcctctgggaagcggtccaggcccaggggactccagggcgctgattatgcatattctggagccagagaaaggcacggctttgtggattctggagtgcaggaacttggaaactggagctggagggggtggagtgtttggcggactgggtgggggcactgcggggccacacccagtgcagatctggagcgggggtttaggagcagcacccctctgcatcctctctctggagcagagaggcaggacaggcggggagtgtggtggggcggacttagttacgctcctcgcccagggagctggtggggctgaggggctcgctcggggtgctgagtgagctggaggtggccgtgtccacagagttgcgcttgctgccgctggtggaggaggtgcaggacgctcggcgcggccactctggtgcacggatgttgcgccggtccttggcggcctcctcgtcctcatcgtagcgctcgccgtcttcctccagcggcccgttccggggatcctcctcgtcctcactctggtgcgggctggagtgtcgtgacagcgagggcgacggtggcaccgaggctggccgtgggtagcggtacccctgggcctgcatacggcgatgtgggtgcaaaccagggtgagctgaggacctcacagtcccacccaggcatccagccacctctaggccttcccactccaggagggacccccaccccaccgaagcccagccctttagctcctggctaagcagaaatccagggtccactcaccgcatccgcctcgttgggctcgtaggtgaagtgctctggaaaggccttggacagcgccatgtggcgcgcagacatatagtactaggggaaaggaggagagggggcagaggatgtgagagccaggccccacccccaggcagatgatgggggtcttggccacaccctttatgcagatgagcacactgctgcaccccatacaaataatccatctatctgactccaccccttatgtagataagcagacctgtgaatggacagtttctgagccatacccctcaaacaggggccgaattctcaagtgagtctcctctttggccacacccttatgcaaatgagaacgcctgaccaatgttctttttttctttttaaacacggtcttgttctgttactctaggatggagtgcagtgggtttgaacaaggctcactgcagcctcaacctccggggctcaagcgaccctaccacctcagcctccccagtagctgggactacaggcacgcaccatcacgctcggctgatttttttttatttttagtaaaaataaaatgttgcccaggctggtctcttaactcctgagctcatgcgatccttcctgttaggcctcccaaagtgctgggattacaaccatgagccaccatcgcgatcggcctggttcattgcttaaagggacagcaactgttacaagtaggatgagaccctgcaccctgcaccaaagacccctagccaggagctgctgatttgccaggagaggataggaaagtgggggtcctacccggcctaggtatttccagtccagaaggtcggagaggcgctccgtgcggttccgctggatgatacgctgccgccggctctgctgacagaaactgtagaggaaggaggtgagctgcgagcaggaatcatccaggctgcggaaccgccggtcaagaatgtagatacctgtggaggccaggacccaggttcagaaaacatcctggggagatcttcatggtctccaggactctgtggcaccaggacccctcctctcccagcggcccgagagcccccccatttcctggtgcccctggtctccaagggtgcaagctcctccttcccaggatccaggagtcactgttctcaagcccccttccagaatcctcaggggcctgggcgctgaccgtaagctgaggggtctgcgatgtgttcctccatgaagcagccgaagccggagagattggtggagatactggggattcccataaccgtgcactcagctgcgggaaggcaggagagagacccacttagcttccctcatcgcctaccgtcttaatcgcaatagacgcctcaacaccgccctctactggcgcctgtaccaagtgccaggcgctgtgcggagcgtcgctgagcccccacaaccaggctgtgcatttccctatttctcagaggggacgctaagaggctcagaaaagagaattacttgctcttgctccaagatgcgggaaagtccatagttgggagataaggatgctaatttattgagcatcccaatatccatttgacttaactctcacaacctgtaggatcgggccaaggtccatcattctacttaattgtcacaacctgtaagatcctttcttgtgccagtatcttgtacggacttagtctattttgatggggggtaagataaggtctctcattattagtatccctgtgtacagagcatctagtacgtcttgtttaatacctttaacaaccttgagaaatagttcaaggaatgtattataattttttgatggatttttatgcttttttttttttctttcgagacagggtctcactctgtcacccaagctgtagtgcagtggcacaatctcggctcactgcaaccttcacctcccgggttcaagcgattttcgtgccttagccacccgagtagctgggactacaggcacacaccaccatgcccagttaattattgtattttttagtatagacagggtttcaccatgttggccaggcaggtcttgaactcctgacctcaggtgatccatccgtcttggcttcccaaagtggtcaaattataggtgtgagccactgcgcctggcccaatgctttttttttttttttctcgagacaaggtctcactttatcacccaacctggaggacagtggcttgatcatagctcactgcagccttgacctcctaggctcaagcaatcctcccacctcagccacccaagaggctgggactacgagcacacaacactacgcatggctaattaaaaataaaaaaaaaaaaggccgggcacggtggctcatgtctgtaatcccagcactttgggaggccaaggcgggtggatcacgaggtcaagaagagaaaaaaaaaaaaaccatcctggccaacatggtgaaaccctgtgtctaataaaaatacaaaaattagctgggtgtggtggcaggcgcctatagtcccagctactctggaggctgaggcaggagaatcacttgaacccgggaggcggttgcagtgagccaagactgtgccactgcactccagcctggcaatagagcaagactctgtctcaaaaaaaaaaaaaaatcttttatagagacagggtctcaccatgttgtccaggctggtcttgaactcctgagctcaagctatcctcccacctcagccttccaagatgctaggattataggtgtgagcc[136 bp omitted]acttcccgaagggctgggattacaggtgcctgccaccacccccagctaatttttgtatttgtagtagagatagggtttcaccatgttggccaggctggtctcaaactcatgtcctcaagtgatcctcccacctcggcctcccaaagtgtggggattataggcgtgagccaccatgcctggcctgatctataattcttatgtaagttttcctaaaaacatctgtaaactgcaaaaataggcactaaatataatacatctgtcaggcatggtgggatgcacctataatgacagatactcaagaggctgaggcagaagcacctgaacctaggagttccaggtgagccttggcaacagagtaataaccccatctcaaaaaagaaacaaatagtaaaatgtattaaatatatatttatgatatagtttgactctgtgttcccccccaaatttcatctcaaaatgtagtccccacgtgtcgagggagggaaatgattggattacgggggtggttcccccgccgctgttctcatgatagtgagtgaattctcacgagatctcatggttttataaatgttcgtttttcctgcaccctcacatacttctccctcctgccgccatgagaagaagcttctttcttccccttctgccatgactgagttttctgaggcctctccagacatgtggaacggtgagtcaattacacctctttccgttataaattacccagtcttggattttttttttatagcggtgtgaaaacagactagtactatctatcaatctatctataaaacaaggcctatggaaaaagggaattggggctgaccgcgactcctaattatcatgcaagcacagtttgcaggacttgttaaattactaataaattaggaaatggcactaatttagctttaatttttttttttttttttttttgagacggagtctcgctctgtcacccagagcacagcactgccggagtgcagtggcatgatctcagctcactgcaacctccgcctcccaagttcaagcaattctctgcctcagcctcccaagtagctgagactacaggtgcgtaccaccacacctggctaatttttgtatttttagtagagacagggtttcactatattggccaggctggtctcaaactcctgacctcatgatctgcccatcttggcctccccaagtgctgggattacaggcatgagccaccacgcccagccttatttagctttaaaaacactggctaatgtgaaccaacaagaggaaggtggagttgatgggcactgggaacgtcttacgaggagacttggccacactcggctgtatttgtgaattgtgcatttcattgccactatttggggggccactgctttctgggagaaagcagtgtgaactgtgacatccagttcactagtcctcaaaacccagtcttctagtttctcaatacatgagctattgtatcacaaaagcacgcgctgtagcagaacaggtgattaccattgttcctgttttgcaaagaaggcaacaggctcagagaaggccagtgcctcgccccaagacatgctagctctgactaggatgccatgaccacgctgtcccctgcccactacactcacccggtgtgtagccccaaggctcatagtaggaggggaagactccaaggtgacagccacggacaaactcctcatagtccacagggagcagggggcttgtggaggagaggaactccgggtggaaaatcacctggtagtgaaaaagaaggactcagcccaagtgccttatttagctaagccctgagatcccaaggtggcccagagagggtaaaaagcttgtctagcatcacacagcatgtgtttggcaggaccaatgttcaaacccaggtctgcctgcctcagaagccagggttctttctaaccacagcaatacctttgataaaacttataggggaatggagtgtgtgaggcccaggacccaaccccttccctctgccgtgcccaacccagccctgaccaaatgccctcaccttcaccctgtcggcactgctattgaagaggccgattcggcggatggtggtcaggatggggtctgaggagtcatccagcatattgtgggtgcacacaggggggaaagactgccgctgcaggagccacaagaagggtaaggggtcatggaagggacagagaactccctacttcctcatgagccatgcggaccctgggggagccaaggagaccacaaatgcaccggacgtggggcaacaaacccaagtgatcaccaggagttgtggattcccactagtacaacctgtaaaggttttctttcttttcttttaaattattattatttatttttgaggcggagtctcgctctgtcgcccaggctggaatgcagtggcacaatctcggctcactgcaagctccacctcccaggatcatgccattctcctgcctcagcctcccgagtagctggaactacaggcgcctaccaccacgcccggttaattttttgtatttttagtagagacgaggtttcactg[136 bp omitted]tcactatgttggccaagttggtctcgaactcatgggctcaagcgatgcatccgttttggcctcccgaagtgctgggattacagacatgagccaccacacctggcctggaaatgttttccttcccttaaccaccatgagcttcaaagaactagaattcccagctgtctttgaggcaaagccgtgttagcaactcccttacctccaaggactatgaggagttgcagctaccttgttctgtactctgggctctattattaaagaaacccaaaggaaatataactatccccagtcaatgggggtggagactgtgccaatatggcagcaagctttggagactgctgggagttgtagtttccttatgaaaattcacttccaaccaccaggcgtgg[298 bp omitted]ctccaaccctaacaaaggcccaaagaaaccacaatttccaagagtctctggagcaagacagagctagtgtgataggaagtcctgaggactgctggggtgtatagttcttagcaactgttccatcatagctcattaaagattttacttaccaccactctactgagtctaggggcccgagaaactacaactcccagcatcccgatggcagaaacattcataatgaggtgggctgctttagggactattggaaattataggttagccaaaagcagttcacgttttgtttctacaacttagctgtctgggtttccattccccaggaaatggctccccaatgtagaccacaagtactgaagtccctggaccccagagaatgaaagaactctaactcccagaagcctctggacaagggaagcgtcaatgccccagaaagccagcaggggctgctgggagttgtagttttttgggcccctagactcaatagaatgacggtaagttctcattttataaatgccaattctctctgaagttagggatctaaagcagctacaattcccaggggtgtctggggaccaacacacagcctctggaaataagaaaccgcagctgctgagagtttgcaatgttttctggagaatgctgggtgcttttgctcacctcctgactgcgtccctaaagtggcccgataaaactaccactcccagcagttttaggggtagaggtggagccgtgtgcagcaaggcccaaggagagctgagagttgtaattcttttatggctgtcttgaccttttcttttctttcttttccttctttcgtgtgtgtgtgtatgtgtccgcctcgctctgttgcccagtctggagtgcagtggcataatcatagctcactgcagcggcataatcatagctcactgcagccttgacctcctgagctcaaggcatcctctggcctcagcctcccaggtagctgggataacaggtgtatgccactatgcccagctcatttttgtatttttggtagagacagggtttcatcatgttgcccaggctggtctcaaactcctgggctcaagcgatcctcccacctcagcctcccaaagtgctgggaatactgacaggtgtgagctaccaagctgggccttgactttcttttgggggtgggtggggggctagtgtgggatctggctctgtcccccaggctggtgtacagtggcacagtcatggctcactgcagcctcagcctcctggtctcaagtgatcttcctgctttggcctctcaaagtgctgagattacaggcatgagccaccacacctggccctttattacatttctacacttccttttaaacttccctttgggctgggaacagggactcacgcttgtaaactcagcactttgggaggctgaggcagacagaacacttgaggtcaggagcttgagactggcctggccaacatggtgaaatctcgtttctactaaaaatatataaattagctgggtgtggtggcatgtgcctgtaatcccaggtacttgggaggccaaggca[137 bp omitted]ttccttttgctcattgaccccagaatcccagagaaaccacacgtcccagcaaccctcgtggcagaataagccacagaaaacagcccaccctaagtgcctcgcctccagcaactgaagttgcacgagtcagcacgtgcccttctgtggacctcagaatagatcccttcataaagggctgcaggagaaagcaggactcccagcaatctctggggtctgagctggcctggcaagctgcctctggggctgccaggaactgctatctctctgcacagaggtccaatccatacctgcgttgcaaagatggctctcttcatcatagtgaagtcttccttatccagcatcttgttcatgtcgggaaggctcccactgcaaggcaagcaggggcatgcatgtgagaacggagtaatgagaggggttagtcagggcctaggagggcacagggctgagggtggggcactcacaccagtaaggattcataaagcttcctcccgaacttttccttcaccgtgttggccgtgtccctggaggaagcagagcaacagggtcacatacacaccagctgccatttactgttaggcttctttagttagtttgtttgtttattttgagacggagtttggctcttgttgcccaggctggaatgcaatggcgtgatctcggctcactgcaacctctgcctcccaggttcaagcaattctcctgcctcagcctcccgagtagctgggattacaggcatgagccaccgcgcccggctaattttctatttttagtagagacggggtttctccatgttggtcaggctggtctcaaactcccaacctcaggtaatctgcccacctcggcctcccaaagtactgggattagaggcttgagccactgtgcccagcagtttatttattattattattattattattgacagagttactctgtcgtccaggctggagcgcagtggtgcgatcttggctcactgcaacctctgcctctcaggttcaagcaattctcctgcctcagcctcctgagtagccgggattacaggcacctgccaccatgcccggctaatttttgtaactttagtagagacggggtttcaccacgttggccaggctggtctcgaactcctgacctctggctggtaattggccacctcggcctcccaaagtgctggaattacaggcatgagctgccgcgcccagctacccttaggtttctaggatagcaaggaaactgaggtgtgagcagggaagccgtgccctggggcctccaggctggaggatggggacccagggggcaggccctggaaggcttaggacccacgtgcctgacatcagctgtgtggtcagggacaggtggccttccctctctgactgcagtgactcatttttcagaggaggatgaaaatagaatcaacctcagaggtttgcgatgaggacccaatgatgtcatgccaaaaagtacacatggcaagccttccagaaatgtcagctattattaggacttgtacttgtcctgcagatggcaatgctaagccccattttatacgaaaagaaagtaagattctgagaaaggaccacttaggcacacaagtaaagctagcagtgtcacacaacagccccacggtcactcctccacttaaaatcctcccatagctctggcctcatttatt[137 bp omitted]aattctcctgcctcagcctcctgagtagctgcaattacaagcgtgcgccaccacatctggctaatttttatatttttagtaccgatgggatttcaccacgttgaccaggctgatctcgaactcctgacctcaagtgatctgccctcctcagcctcccaaagtgctgggattacaggtgtgagccaccgcgcccagcctctttctttcttttttttttttttttttttgagaccgagtctcactgtcacccatgctggagtgcattggcgcgatcttggctcactgcaatctctgcctcccgggttcgagcgattctcctgcttagcctctcgagtagctaggactacagatgtgtgtcaccacgccctgctgattttttttatttttaggaaa[131 bp omitted]agacagagtctcactctgttgcctaggctggagtgcagtggcgcaatcatgcctcactacagcctcaacctccagggccaaaatgatcctcctgcctcctgtagctggcactacaggtgccctccatcttgcctcactttctaccccttctctatgagacatgtcactccagccccatgggactccccaccgcgtctcaatcatgcctcggggccttcgagtttgctgttcctcagatacccacagggcttgctccctcgtcacctttcctcgtctctgcccaataacactttctcagtgtggcctgtcctgacaaccccgtctcatattccagttctgctttatttttgcccaaaagtaaattccgtctacaggattttctagaatacaagctccatgaggaaagggatcttatctttctggttcacagctgtattcccaggacctggaatacatgaggagggcaggtcacttgaggtcaggagttcaagaccagcctggtcaacgtggtgaaatcccatcggtgctaaaaatataaaaattagctagcacatagtagatgctcagtgagtatctctgctaatgaatgaacggttttacagatgaagaaactgagctttgctgggaggcggaggttacagtgagctgagattacgccactgcactccagcctgggcaacagtgagactctgtttcaaaaaaaaaaaaaaatcagagaaaagaaaaagaaactaagccaggcgcagtggctcacccctgtaatcccagcactttgggatgccaaggcggctggatcacctgaggtcaggtgttcaagatcagcctggccaacatggtgaaaccccatctctactaaaaatacaaaaaaaggctaggtgtggtggctcacgcctggaatcccagcactttgggaggctgaggcaggcggaacacctgaggtcaggagttcaagaccagcctggccaatatagtgaaaacctgtctctaataaaaataaaaagttagccaggtgtggtggcacacccctgtagtcccagctactcagaggctgaggcaggaaaatcgcttgaacccaggaggcagaggttgcagtgagccgagatcatgccattgcactccagcttgggcgacagagcaaaactccatctcaaaataaaaaaaaaaaagagggccgggtgcggtggctcatgcctgtaattccagcactttgggaggctgaggcgggcagatcacgagatcaggagtttgagactagtctggccaatgtggtgaaaccccatctctactgaaaatacaaaaattagccaggcatggtggtgtgcacctgtagtcccagctactcgagaggctgaggcagatgacttgcttgaacccaggaggtggaggttgcagtgagccaagatcgcaccactacactccagcctgggcgacagagtgagactgtctcaaaaacaaacaaacaaacaaacaaacaaaacaaaaaactgagactctaggagaaacacaggacccaaagcatgcatctgggagtgggctgcgccaggggccggagcgagggctgctaaccaaagctgtttgcgcacagcttggcctttgagggtttccacgttgaaattgttggtccgcgctggcatgatgaagaaggcaaccactgtctgctcgctgccgttcacctgcgcagaaagaaaggagggggaggccaggatcatgtgggggaagcctggaaccagccagcctttctgtcaagaccactgggatcctgccatacccattcctgtcaaggagaattataggacagtccccacctggactctgaccttctttctgggtctctatactcccctcacggccccccaccatactcaggggctttcctacccccatcttcctggcttcttgggtttctgttctgtaattttttgttttgttttgttttgttttgtttttgagacagcgtctttttctgtcgcccaggctggagtgcagtgatatgatcttggctcactgcaacctccacctcccgggctcgcgtgatcctccccgttcaccctcccgagtagctgggactacacgtgtgagccaccatgcctggctaatttttgtattttttgtagagatggggtttcaccatgttgcccaggctggtctccatctcctgggctcaagtgatcctcccgccttggcctccaaaagtgttgggattacaggtgtgagccactgtgcctggctgttctccctagttataaactgctttgcttgccctccctgtcccctcatagcccaggcctcactctgagcagatagttgagccgagccaatgcctccaggaagacgtcagcacccttgttggagaactcatagcggccggcgataaagaagtataaggtcttgtccaagttgaagtccagatgcctaaagaacccacaaggcacggtaaagcccaaagccctcacccgctagccctggcctcaaaactacaaatcccagaagctatgggtgggggggcagaggatgtcttaggtaatacagaggcatcacggggcctcctgggagttgtagttcttctctttagatggagatttcctttaatcctgagcccattgttccagcgctcaagaattaaggaggccgaatacccaggtgccccctccctcagacccaggagtctgggcccccagctgccccctcccccagacctagatggttaggctcccaacgccctcctctcttaagacctaggtatatgccccacgtacccataaaaatggccccgcacaaactcctggattcgagccttgctctgagcatggaggttctggaactcatgcatggcagaaaacttcttcacattcagcccattgggggtcacaatatctgggattgggggtgagggtcccatgttttatttgttcattcagatcaatgttgtggttgaatgaataaatgaagaaaacaccctttgccttttgcaatttttttgtttcaagagcgttcctatgaggtcccccctcccaccttttttgtttgtttgtttgtttttggagacagggtttctctctgtcgctcaggctggagagcagtggcacaatcacagctcattgcatccctgacctcctgggctcaagcaatcctccctcctcagcctcccgagtagctggcactacaggcgtgcactaccacacccggctaatttatttattttacttttgtagtgatggggtcttgtcatgttacccaagctgatctcaaactcctggcttcaagcagtcttcctgccctggcctcctaaagtgctgggattacaggtgtgagccaccatgcctggccagttcccttggtgacacacctaccctgactccaagatgccttcttgcctaatattacttgcttaggttcacaagcacaagtataagtctcctcagctactgcaaatggctaacagggatctgatccacactggtgattctgggaaagttgtacttcttttgtttcctcttagcccaccctgagatggaaatgattaaacatccccaaagtcctgcttctcctaggatatatcctctacttccaagcttcttacagggacccaatcatttcttctcctcatagaaattaaagtatatcaacgaaaaactacaacccccatcagcgcctagggcaaagttctggaacatatagagctaaccagtcaaaggccttctgggagttgtagttctcaccttatactcactgagaacggatactaagggctgggaagaatgcccagttctgacctaacctttctcaaaagcaaagtccactgatcttccattccctttcataagaccaatctacattagccaattacagaattttatcatatctgaaattaatatgaaagaaattatacctcccattagcctccagagtatatagtcagagagcctcaaatacaggtcaccacccccacagccttctgggagctgtagttctctattctttaggtaaaaaaatggtaactgatggtccccagcttaggacttaggatggtccaagttatgatttttcttttcgagacagagtttcgctcttgttgcccaggctggagtgcaatggcacaatcttggctcacgacaacctctgcctcctgggttcaagagattctcctgcctcagcctcccgagtagctgggtggctgggattacaggcgcctgccaccatgcccacctaatttttgtatttttggcagagagggggtctcacaatgttggccaggctggtcttgagcacatgacctcaggtgatctgcccacctcagccttccaaagtgctgggattacaggtgtaagccaccgtgcccagccaagttatgatttttcaaccttatgatggtgtgaaagttacatacatccacatgagtccaattttggattttgatgagatattcaacactttttttttttaattttttgagatggagtctcgctctgttgtccaggctggagtgcagtggtgtgatctcggcccactgcaacctccgcctcctgggttcaagtgattctcctgcctcagcctcccgagtagctgggattacaggcacccaccaccacgcccggctaatttttgtatttttagtagagatggagtttcgccatgttggccaggctggtctcgatctcctgacctcgtgatctgcccgccttggcctcccaaagtgttgggattacaggtgtgagccactgcgcccagcctattcaacactttattataaaataggtttgtattaaaattagccaggcgtggtggcaggcgcgtatagtcccagctacttgggaggctgagg[139 bp omitted]tggatgattttgcccagtcgtaggctaacataaagtgttctgggcacatttaaggtatactagcctaagctatgatgttcagtaggttaggtgtattaaatgcatttttttattttttgagacagggtctcactgtgtcacccaggctgtgacagggtctctccaggccacccaaatcatgcaatggcacgatcacagctcactgcacccttgacctcctaggctcgagcaatcctcccacctcagcctcctgagtagctagggatacaggcacacaccatgtctggcgaatattttagacagggattcgccatgttgcccaggctggtctcaaattcccgggctcaagtggttctcctgccttggcctctcaaagtgctgagattacaggtgtgagccaccatgcccagccgaaatacgttttcggtttatgctatttcaacttacagtgggcttcttgggctgaggagcaactggctttggcatagacagctgcctacctcattcacgtctggggacttcagcccagcccctacctggtttcctcttgagcaagtgctgtgcctcgatggcggtgatctgggacacagtagtgaagacgtgagcgcagtgggctgccgccctttccatgcagtatcggtggtagatctgcctctcccctgcttccttgtccacgttgaactgggtgggaggggacagcagtccggttagaaggattggggagaagactctggaggtccagacactggggtcccaagagaaattggtgctgggggctggattcctgggtctgaggtaggaggggtctggggacttggactcctggatcctgggagaagagggggtgccatccccttgggccccccagagctttgggttttcctggcatactcgcagtcccccatctgccacggtcccagctcacgttctccaggttgttgtagaagtccacggcaccggcacacaggtagcgccccagcagcgtggcatgggtggtgaagatggttgctacaggcagtcgccgggcacgacacaggcagagtccaacgcctgccaaccactcatggaagtgagcaaccacatgtggcttctcctcactctgtgccaggaactgtgggcaacagggacagggccactgtctccacgagtgttgggaaaagaatcggcaatccccagtagggacaaggactcggggagaggtcaatctgtcaccactactgcacagagtgggcagcggcccactgcagcaatcccaaccggacagggacctgtaaatccctgaggcagcccaggctggtcttgaactcctgggctcaagtgactgcctcctcaggggttgacaggaactgaggattttttggccaaccatctaagtcctggcagggttagattggacagactgaagttttcatgttcccaggtcctggacatagtttccaaagaccccttgtctcaagggtacgctgtctgcacccaacattggcaaagggactacaactcccagaatgccataggagcagccagttcctcaattatttgtcccagggcatgagaaattaagcttctttttttttttttctttttctttttttttttgagacagtgtctcactctgtggcccaggctggagtgccgtgatgcaatctcagctcactgcaattcccgcctcccaggttcaagcaattctcctgtctcagcctcccaagtagctgggatttgggattacaggtgcccaccaccacacccagctaatttttttgtatgtttagtaaagacgaggtttggccatcttgaactcctggcctcacgtgatcttcccccatcggcctcccaaagtgctgggattacaggcatgagccaccgtgcccagcctggaaactaagcttcttgagcctcttaaaacctagaagggggtcaaaaccaggtcaggctggggattcatgagcatccagggcagcatctgagagctgagtccagcaatatcacactagagaactacaactcctagaattcctcgggcaagcccgccagcctcactttgaggctgattccaagaatccctatgcttggaagactagagtaaatgaagttggcatcgagagtagagcctgggcccttggatgttcatgtcctcaaaggccagagctaatccttggattaaaggaccctatgactcccagaatgcccagggagaagcccatcctctggcccaggggctgatggtcattgtagtttcaggtatgggtggaatgtgtcagacggggcctacctcacccaggaaccaggtggtcagaaagccaaagaggacagcgtcgttggcctcgcggtcgtaccacggcactccgatgttgcaggtatcccagagctctcccttccagcgctccagggcccaagctgaggcacccacgtccaggagcaccaccagagggcctccctcgatcagccagcgcccgaaatacacctgggatggggttggggaggcaccatagggaggctctgggcttcagcctcatatcttcactcatccgtggttctcccatttgcaggcagatgtctatagacttaagcctcagctctcttatcttctgtttccatatctgctgctaatttctcacctgctgccttagccttacttctctatttgcatgatttattcctgctacacattttttccatctctgttgcaatattttccgtgccccctgcttactttctttctttcttttttttgagatggagtctcactctgtggcccaggctggagtgcagtggtgcgatctcagctcactgcaacctctgtctcccgggttcaagcaattctcctgcctcagcctcccaagtagctgggattacaggcacccgctcccacacctggctaattttttttttttcttgagacggagtctggctctgttgcccaggctggagtgccgtggcatgatctcggctcactgcaacctctgcctcctgggttcacaccattctcctgcctcagcctcccgagtagctgggactacagcggcccgccaccacgcccggctacttttttttgtattttcagtagagacgaggtttcactgtgt[139 bp omitted]tcctttctctgcttataaccacatatgtcacatgtcctgtgtctatgcccccactgccctgtctggccactctgcaaatcatttcccctacctgctgccttgtttctgtacttgctgccacatttctcttaccaaccatctgcatctcccactgtcttttctttctgatgctaattccttccacgggatgcttcttttttgttttcagacagggtctcgctctgttgcccaggctggagtgcagtggtgtgaacatggttcactatagcctcaacctccctggctcagtcaatcctcccacctcacctcctacaggcgtgggccaccatgccaggctgattttttaattttttgtggagatggggtctcactatgttgcccaggctgatcgtgaactcctgcgttcaagcagttttcttgcttagcctcccaaagtgttgagattagaagtgtgagccacctaaagcaggcccttttttattttcagagacggggtcttgctctgtcctccagcctggaagggagtggtgcaattacggttcactgaagcttcgatctcccaggctcaagcaatccttccaccgcagcttcccacgtagctgggaccacaggcacaaggtatcacatcccggctaatttttaacttttttgtaaggacagggtttcaccatgttgcccaggctggtctcaaactcctggcctcagcctaccaaagtgctgggattacaggcgtgagctactgcacccagcctgtaatgattctcttactgttcatgctgccacttttcttccccatgatgccttgtttctgttcctttcatcacatatctgtcacctgcgacctctttcctctatccataggcccattttgtagtccacagcctccttccttccttccttgcttccttccttccttccttccctctctccctccttccctccctctctcctttttctttctttcttccatttttttttgtttgtttttgtttttgacagggtctcactccggtcacccaggctggagtgcagtggtgcaatcatggctcactgggctgggcgcggtggctcacgcctgtaatcctagctctttggggggccgaggcgggcggattgcctgagctcaggagtttgagaccagcctgggcaacatggtgaaaccctgtctctactaaaatacaaaaaattagccgggcgtggcagcatgtgcctgaggtcccagctacttgggaggccgaggcaggagaattgcttgaacgcgggaggcggaggttgcagtgagtcgagattgtaccactgcactccagactcagcgacagagtgagattctatctgaaaaaaaaaaaaaaaaaattatggctcactacagcctccacatcccatcctcccacctcagcctcctgagtaactgggatcacgagcacgcaccatcatgcctggctaattttttgtatttttagtagagacagagtttcgccatgttgcccaggtgggtcaggaactcctgggctcaagctatcctctcacctcggcctcccaaagtgctgggattccaggcatgagccaccgccctcggccacgccacacatttctaacatagcccatcctctgtccgtgccccagggctgcatttttctagccactgccgtgtttctaagacttgctgtctcacttctgcctctgccacatttctccagttggctgttttcctccctgagaccatggctttggttctgggcctgctgccacagcagtggagaagcagccccgctcctcgccgacctggctttttgctgcctggagcctcgctctgaggtccctccccctcccagctgttgtctgcccttttgctgggggggggggggggctattcttaggcccccagcacgtgggaagcagctgccctcaggaagcgactgggctgttctgggttcccttagggacacagtcggacctgaatggattccagaccccaccccaaaccagaggctgtgaatgagtaaaggaaccacagtgcctctccatccccagcctggacctgtctgtcccttagccctgccgcctgatggctttctccttggacaacagcgtgccgcctgatggctttctccttggacaacagcgtgtctctttccgtcttcaccctggggccctggaactccccctcctctctaatccctgatctgcccatctcagactctgtcctgtgggtctgtccactgacctctcctctcttccccgatattccatgcttctctctccttctaggactggctttctgaaacatctggtggcctctcttctgtccccagtctattactcttgcctgtggctccatccacccttctcccttggtctgcctgtccccctcactctccaagcttggctgttagtaacaataatgacgatgatcataacaatgacaatcaccgcccacacaatgtgctaccttcatgccaagaactctactaaccactttgtccttattaactgtttcctcctcccagcaccgctagaaggtagacgctattagcatgtccattagccaaggacacacaggcagcaagtggagggtgaacttgaacttcaagctccagaatcctgctccttcctgacctcaggcccacttctccccagctctgcctggctggctggcattcttttctgagacagagtctcgctccgtcgcccaggctggagtgcagtggcccaatcgcagctcactgcaacctccgcctcccgggttcaagcgattctcctgcctcagcctcccgagtagctgggattacaggcacccgccaccacacccagctaatttttgtatttttggtagagacggggtttcgccatgttgaccaggctgtctttcgatcttgctctctttctctctgggtctgaggaccttggcctcttggatctccgtctcagtctgtctcatacttgccatctgtctgtccattcgcccatgtctgggatccacccacccacttccaggccctgcatctgtctgggtgtcctatcacgcctccttcctgtgtccaagcctgcctcgctctctggctggggctgtccaccctgcaccctctccgtctgtggctcccaccccgatggcaggctgtccacccgcttctgccctgggctgggccacgtcccaccttgcagcccttgctgttcatggaatccagtgtcctcttcagggccggggtgggggcctccagcagttccacctgggtcctcacgccctgctccgtgtacggccccaccaggaagtagttgtcgccccattcgtcccctgtcaccttcgccttcgtctgcagcaccgtgtagatgccacccactgtgggcccaagcgtgtgagggcaggccccggccgaggtccatagttctggggcctggggtggggtgggccggggatgtagggggcactcaggccccagacctctagctcagggggaagaggggactgggagcccatagtttggagtaggggttggaagcttggatgaggggaacacgagggctggagggcagtcctcctgggtctaagggagaagggggctggggtcaggaccctgaaggaggagggggctcaggctagacttctgggtctgagagagaaggggctgggtgccgggaccccttggtctgaaggaattaggcactggggctctaaggatggcagagctgaggactgactacccggactcaggttcccgagttcccagctcacaggagctgggtttaaatcgcagccaggctccaaaacccagtgagggagaccccctcatggccaatccagcttctcaccattgcccaagagaagcctgcatggtcattccctgcccccagggaccttgctgacctgcctcccaatttcctctccctgactagggacaccagcatgcagggctctgcctctcccatgaccctatcccagacccaggagccccagcccccagcctcctcccatcctggagcccaggccctggcgatacccggctgggtgttcacgggccccctctcctcctgggagacacagtccctttctcctccaagacccagcaaagcaaccccccagaccctgctctttgaggtgtgagattggcttgttcctggggatttcagccccagccttctccaaggccagaacctcagctttctgaagcccaagacacagaaatgcaggctcctagcccctcccatcctagggcccagcctctgactaacttaggacttcccagccttcccctattccagtacgcatgtgtcccaggccatgggctcctctactcctaggaactaatagctcaggccctcagctccttcaaagcccaggcattcattacagtctccagcccgtcccatctttattcttaagcagccagatcctcaggtcctcccaccgccgctcaggcctcctatctcccagtcagctctctctcaaatctggagttttatcccctagaccatgctgttagggtcataggtctgaaaccccggcagcttcccaggtttgcacgcagaaatcccatccccccatccccttccctgttcaggacccaggtatctagtctctcggaagcctgcctccaggacctaggagtctcattttagcgccctcttccctaggacccagaacccgggcttccagcctcctttcatcttaagtcaaacgaaccatccctctcccacccacctccggcttcccagcccctcctcaaggacacagcctccttgcccaggtcacaagggttcccctagtagccccgtcctcctacaactcagagttccgggcccccatccactactgtccttctcgtcaagggccccgacgcctggcgtgctcacccttgttagccacctcccaggccacttcgaagagcactgcgttctccaggtcgaattcatcctcccagtcctccagtcctggcagtgaggacatggacaaagtgcggtttaaaggcatggctggcgcaggaaggggggctccggggatctccaggtagggaccccggaggtgtctagggaatgcaccaggtagggtgcggggccgagtagctggtgcccgacgggaagcttgcaagacgctcggcttcctattgcaagaccgcacccctgccccgaagcgttgggacctaggcagaaggaggccgcagcgtcactgagcccactggcgcccctgcagtgaaacctcgcagccgccaggaggcggtggccgccccccccagccagcgccattggcccacgcccgggggcggggatttccgcgtgtcctcattggtggaacgggttggagtcgctgtgtcccggccccgcctcggccgtgagacctccagggggcggagcttgccgctgcgctttacggaaacgagtggccttcagctctgtcaatctggagctggaggcctcaaagtggggaggaggaggagggtgggataaagaggaaaggagcgtggaggacgtgtggttactcaaagaacagctaagaattttgcaatcggcctgagcggggcggtggtggggctgagcaaaaggaggaggagccaggagacattgggaatggacccaggagttccggacgcccgtcttccagcgcagcctcggtgggagggcggggcataaagtcccgccacgcccccacaatatttacatatttatgaggaaccatcgagatctttgaagaaccagctagcctagaggagccagaacatctcgctcctcgcgcgtttccgtttccgctaggactctggcagttggtgagcatcatggcaaccgttgtaagtgtgggtgcatggagggtgaggagcgagctagcagtctcgagtttgagagaggaggatgctggaggccctgactcctgggtctgagggaggggggatctgggggttcagactcctgggtctgaaagaggaggaagctcggccacccagatctgggggagaaggggacatgggggctggacttctggatctgaggcggggagggggctgggatcccagaatctcgggtctggccccatcatgctataggaactccaactttcaaaatcatcttggcgcaacggccggttccgcagtccttggcgccagtgtgtgatgaggagggttgtaggaccttgcgcttcgagccatttgggagccttggattgttagtggtgccaatggcacttgagttccaagctggaagcacaggcaggtacctgttcagtgtgtctgagagcgcgagggcgcctagtgagcctttagtgggaagaaattgtcgaggaacaagagagtcttagtggagaggactgaaggattagggacccagaaatcgggatcttgtcatgctaccgttttggccattttcatatttccagtatttcacacgggctacgtctcagtgtaaatgctcaataaattatcacttgaatatttgaatgaatgaatacatgtgaatgaaggagaggccaggaaacttggcctggcacct[136 bp omitted]ctattaaaaatacaaaaattagccaggtgtggtggtgcaggcctgtaatcccagctactcagaaggctgaggcaggagaatcgcttgaacctgggaggcagaagttgcagtgagccaagatcgcgccactgcattccagcctgggcgacaaagcgagactctgtctccaaaaaaaaaaaggtaatgtgacctgaacttagggactgggctgggcttacaggtgcctcaatttccatgatgagcccagtcaagatggaggaagggagggggagaaagttgttggtagctggggatgagatttgagtctgttgctgtcaccagggcaaggaggaggaggaggtggatagggaagtagaagaggaaggctatgaccagaactaccgtggagaaagtattggaagtatgaggggacggtgtgtgctgagttttgaaatgaccttggttttcatgggaacagcgggcagcaaggttttggagagacttatgatgaaagagaaagtctttataggagacagtccttggtaaggggcctgtttatgttgagagagctacatttgggattcctggattcatgtcttttttgtggggtggggatgcctagtcttctgcttgtagtctgggggtaatgttctatgctcctgggttccagcttcctataggagacggtaggtgggaaggttcacacagtgacagggaaagcttgtgaccattgatggccagaaagtctaaacgattggctccagagggaggaggcttcctctgggctggataactgcatgtcctctctaggggaagaagagaagaaagacctgtgggctgggcacagtggctcacgcctgtaatcccacactttgggagtccgaggtagaaggattgcttgagcccaggaatttaagactagccctggcaacatagcgaaaccctgtctctacaaaaaaataagaaaattaggccgggtgcggtggctcacacctgtaatcccagcactttggggggtcgaggcgggcaggtcatgaggtcaggagtttgagagcagcctggctaatatggtgaaaccccgtctttattaaaaatacaaaaaaaattagccgggcgtggtggcacatgcctgtagtcccaactactctggaggctgaggcaggagaattgcttgaacccgggaggcgaaggttgcagtgagccgagatcgcgccactgcactccagcctgggtgacagagtaaggctgtgtctcaaaaaaaaaaaaaaaagaaaagaaaagagaagaaaattagccaagtgtggtgggacacacctgtagtcccaactacttgggagactaaggtgggaggattgcttgagcctgggaggtggaggccacagcagtccagcctgggggacaaaatgagatcttatctcaaaaaaaaaaacacaaacctgtgggaaggaaggagacctggggatgggtggcctcggttagcatgctagcttcttaggcttccttttccttattagaaattatgaactattccaaagtgtcagaaaataatgtaacagacatgcaaagatccaccatccaggattgtttttttgttttttctttttttcaagacagagtctcactctgtctcccaggctggagtgcagtggtgtgatcttggctccctgcagcctctgcctctctcccatgttcaaatgatcctcctgcctcagcctcctgagtagctgggactacaggtgcgcgtcaccacgcccagctaatttttgtatctgtgtgtgtgtgtgtgtgtgtgtgtgtgtgtgtgtgtgttagtgatagagtcttgctctgatgcccaggctggagtgcagtggcgcgatctctgctcgctacaacctccgcctcctgggttcaagcaattctcctgcctcagcctcccaagtacctgggattacaggcacctgccaccacgcctggctaattttttgtatttttagtgtagactgggtttcaccatgttggccaggctagtctcgaactcctgacctcaagtgatccacctgccttgacctcccaaagtgctgggattacgggcgtgagccaccgtgcctgacctaatttttgtatttttagtagagacagggtttcaccatgttggccaggctggtctcgaacccctgacctcaagtgatttgcctgcttcagcctcccaaagtgctggtattacaggtgggagccactacgcccagcctgttgttttttttttttcttaatagctttattgagatagaattcacgtactacataattcacccatttaaagtatacagctcagtgttttctagtatattcacagacttgtgcagccatttccacagtcaattttagaacattgtcgtcaccccaaaaagaaaccccatgcctcttacctgtcaccgctaatccttccatacctcccatcttcagttctaggcagccactaatctttctctgtatatggatttgcctattgtggctacttcatatagatggaatcataccatatgtgtctttcgtgtgtggcttctttcagtcagtataatgttttcaaagttcatccacgttgtagcatgtatcagaactccattcctggccgggcgcggtggctcacgcctataaccccaacgctttggggtgccaaggcaggtggatcacctgaggtcaggagttcaagaccagcctggccaacatggtgaaaccccatctctactaaaaaatacaaaaaaatattagccaggtgtggtggcggacacctgtaatcccagctactcgggaggctgaggcagaagaatcacttgaacccaggaagcagaggttgtagtgagccaagattgcgccattgcactccagcctaggtgacagagtgagactatgtctcaaaaaaaaaaaaaaaagaaaagaaaaaagaactccattcctttttatgactgaataatattcctttgcacaaatagaccctgttttattttgccattcatcagctgatggacatgtgggttgtttctatcttttggctgttgtgaatagtgctgccgtgaacactcgtgtccatgttttgtgtggacctctgggggggtcctgaattgtcccgggtggtgtttactcacctccctcccccatgtgagaaggggtggtagctggctcctctctgtggagaactgtcaacatgggaagcctcggtatattcttgttgaatgagctcagcactttagagtatcacttagcaaaccacagacattgagtcccgaggtgaacaagagagaacaggccgtgcccttcatgggactcatgtccactggagcagagaatattgatccatccatctccctcgggaatgtgagatcacacagggagatcgggctcccagggaggcctttcatctgtctgaatgtctagaggtcctagaactagcctggcagggctgttggacagaaagggcctcccctagggggcagcacttgatctaattcagtgagagggcagggagagcagtctggactcaggggccagcatgtgcaaggcctggtggttgagaactggggccgcctggtacaagggatgctgggaaattagcaggggccagagcatgtccagctccatgcctgctcctcattggtgtctgtccttatggagctcacagttattagaaatggggaggacttgtctgggcacggtggttcacacctgtaatcccagcactttgggaggccttggtgggcagatcacttgaggtcaggagttcgagaccagcctggccaaccccagtagagatgggcgaaaccccatctctattaaaaatacaaaaaaaattagccaagtgtggtggtgtgcgcctgtagtcccagctactcaggaggctgaggcgggagaatcggttaaacccaggaggcggaggttgcaatgagctgagatcgggccactgcactccaacctgggcgacagagcagactccgtctcaaaaaataagaaaaaaaaaaaagaaatggggaggacttagccgggcacagtggctcacgcccataatcccagcactctgggaggccaaggctggtgtatcacttgaggccaggagtttgagaccagcctggccaacatggcaaaaccccatctctactaaaaatacaaaaattagccgggtgtgttgatgcgcgcctgtaatcccagctagtcaggaggctgaggcagagaatttcttgaacccaggaggcggaggttgcagtgagccgagattgggccactgcactccagcctgggtgacagagcgagacttcatctcaaaaaaaaaaaaagaaacagggaggatttcattcattcaccaaataaccaaatatgtgctggaccctgaggaccaagctgtcgatgagacagacagtccttgtcttcctggggctcaaccaaccagccattaggcagtgacaggcaagaggggtgggggtgactggtgcctgtcccatcgcctgcctgtgaggggaaggagtggaaaggaccatctcatgggagggacagaggaggggttggtgaaagctgggaccacactagtcctctgacacatcttcttgcacccccagacagccacaaccaaagtcccggagatccgtgatgtaacaaggattgagcgaatcggtgagtgagttgggtcaggaataggacctaagccctgcctgccatgtgccctgacagagcaaacctattgaggacccctaagatggagagggaggtggcctgcacaccaactgtgcccccactaccattcccccactcgccctatctaatgggggaggaggatcctcagttccagagttgggtcagatgatgcactggggaccaggctgctatcctggctatcctggtggggttcccgggtatgtttgcctggaagtcatagatatttactgggtgctttactgggtttggcctcgtatacccagtacacactgtggggtgagttccctgagggcagggacgaggtcgtgtcattcctagctgtgtccctagcacaggacctaacagagcagatgatcaagagataaccattgaatgcacgagtttgcgtcctgtggagccctcgcagtagccgcatgaggtgcatattgtaactgttagctgagggaactgattttcaggacagctaaatcactggccccggctcacacagagcaggaagttgagacgcagtgaggccagcagggtgcgctctcacaaagagctttaccggcagggaagtgaccgcattcattcatgcagcaggctcactgattcagggcatccgagaaaggcagtaagggcttctggctgtgaagatgggttttagaagcccagtgctggattcctggagcttagctctgccactttcccaccatgtggccagggactagttcctctctgtgcctcagtttccttatctgcaagacgaagctaagatagtttacctcatcagttaatgtaagattcagtaaggtagttcatataaagcattttgggtctgtgtgccaacactgtttcatctattaaaagtgctggggcactgggtgcagtggctcatgcctgtaattccagcactttggaaggccaaggtgggcggatcacctgaggtcaggaatttgagaccagcctggccaacatggtgaaacctcgtctctactaaaaatacaaaaatttgctgggcgtggtggcgcgtgcctgtaatcccagctactcgggaggctgaggcaggaaaattgcttgaacgaggaggtggaggttgcagtgagccaagatcatgccattgcactccagcctgggtgacaagagtgaaac[150 bp omitted]tctactaaaaatacaaaaattagccaggcatggtggtgcatgcctatagtcccagctactagggaggatggcttgaacctgggaggcagaggttgcagtgagccaatatcgtgccactgcactccagcttgggtgacagagtgactccatctcaaaaacaaacaaaaagtgccaagtatggccgggcatgatgggtcacgcctgtaatcctagcactttgagaggtggagtcaggaggattgcttgaatcaggagttcaagaccagcctgagtcacatagtgtgatcctgtctctaaaaaaaaaataaaaaaattagccggcagtggtggtccatgcctgagtcccagctacttgggagaactgcttgaaccaaggaggttcaggatgtggtgagatgtgactgcaccatgcactccagcctgggtgacagagtgagac[180 bp omitted]c[138 bp omitted]cctggccaaaaaacaataaaaaattaaaaaaaaaaaaaaaggatgaagagccaagcaccgcttgtgagctgaggacccagtagagactagctgcacccaggagcctcccttggggtgctcacagtcaagcactggggtcagcaaatctttccttattttattttatttttttttttgagacggagtctcattctgtcccccaggctggagtgcagtggcgcaatcttggctcactgcaagctccacctcccgggttcacaccattctcctgtcagccttccgagtagctgggactacaggcgcctgacaccacggccgtctaattttttatatttttagtagagacgtggtttcactgtgttagccaggatggtgtctatctcctgacctcgtgatccgcctgcctcggcctcccaaaatgctgggattacaggcgtgagccaccacgcctggaccctagcaaatctttcttaaagggtcagatggtaaatccttcctctgttgaaactactcaactctcctcttgcagtgcgaaggcagccacagacagtatataaatggcagtgttccaatacaaagattttttggttggttttttgttgttttttttttgagatggagtctcactgtgttgcccaggctggagtgcagtggggcgatctcagttcactgcaacctccacctccctggtttaagtgactctcatgcctcagcctcccgagtatctgagactacaggtgcatgccaccacgccaggctaatttttgtattttttagtagagacggggtttcaccatgttggccaggctagtctcgaactcctgacctcaggtgatctgcttgcctctgcctcccgaagtgctgggattataagcgtgagccaccgtacccagctccaataaaattttatttgcaaaaacaggtggctggcctccaggctgaggtttgctcaaccctcatctaatgtaaagcatgggaatcccatcttcccctctcgctggctgtgtggctggggcatgggacctaacctctctgagctccctccccattcatatcaataggttctgggactgttgccattttgatactcagaagtgctttcagggtgatagcagccagggctcttgtttcattttattttgttttactgagacaggtcttgctctgtcatccaggctagaatgcagtggcacaatcttggctcactgcaacctccgcctcccaggttcaagcaattctcctgcctcagcctcctgagaagctgggattacagtcatctgccaccatgcccagctaatttttgtatttttagtagagacagggt[131 bp omitted]atcatatggaataaactgagaacatgtgggtgctgtgtaaaccataaacatgaagtaattgtgatcattagcccttgtggttagatcttagtacaattatgtgcttaatcaggcctcagtgacttttgtttaactaggatgcatcctcagagcagctccagttcattgagcatttaccacattcagccatcttcctagggaggtgccaatttgggatatcctttccatgtgccccttcattcccccaacccctgctccctactcccacccacccctttgacaaagaaggaaaccagggctcagaggggtcaggccacatgtgcagcaagctggctagtaactgagtctttgttctttcccttcatgtaggtgcccactcccacatccggggactggggctggacgatgccttggagcctcggcaggtagagcagaggaggctggggtgtgagggcctctccatgaaggtcttgggtagtgggtacccagggtcctggggagtgtggggactatgttacggtcttctggacctttggctacatacccataaacttcaaccacatgtgggttttcttggtactaaagaattgattaggctaggtgtggtggctcatgcctgtaatctcagcactttgggaggccaaggtgggtggatcacctgaagtcagagtcaagaccagcctgaccaacatggtgaaaccctgtctctactaaaaatacaaaaattagccgggcatggtggtgcatgcctgtaattccagctactcaagagcctaaggcaggagaattgcttgaacctgggaggtggaggttgcaatgagccgagattgtgccactgccctccagcctgggtgacatctcggaaaaaaaaaaaaagaattgggagtgggtagcaattgctttgccaccttaaaaaaaagttagactgggtgcaatggctcacacttgtaatcccaatactttgggaggctgagatgggaagattgcttgagcctaagagcttgaggccagcctgggtaacatagtgacacctcctttctacaaaaaattttaaaaattagctggacatggtggtgcacatttgtggtcccagctactcaagaggctgaggtggaaggatctcttgatccctagaggtcaaggctacagt[131 bp omitted]gcttccatctcactagcttcctgatgtggtagaaatgccatggtagccccacaggaaatcacctcatgtgcgcctcccacccacaggcttcgcaaggcatggtgggtcagctggcggcacggcgggcggctggcgtggtgctggagatgatccgggaagggaagattgccggtcgggcagtccttattgctggccagccgggcacggggaagacggccatcgccatgggtaagaaacctcccagggcaggaactctcctgtttcctgctaaataactcctcctgtgtaagtcagggtcaggatgagccgcctttaacagatgacccaaaatggcagtggcttaaacactcaggattcattcttgcccatggaagaatctagaggtaggccatttggggcttattaagcagttccaggaagtcttccatcttcctgcctcaccatcctctgcacttggttccagtcaagaggacgccatgttccaagagggctgccagagctccagccttcccactcataacccaggcagcaggaagaaaggagttgccatgaggatgaaccccctcgagttggcttcctttaaacagtcattggaaatcctccatgcttctgcttatatctcattatctcattgactagaatgtaatcatatgatcacactctgcttcaggggaggctggcacattaaatgttttttaaaatttcataatttggaccatttttgccttaagaaaatgaggattcttctgttgggcaaaaggttgttgtaaaaataaaaaattaaaaaaaaaaaaacaggaaagaaaatgagggttctagaactaaggaagaaggggaaggtgggtattgaggagtcacccagcagtctttgttgcagtccgctagtggtttatgatcttttcactcccagctgttcctcttcttccttgttgaactcctatttatccttcaaaaccctacttcagcatctctgccccattgaagcttttcctaacccactgctcttcccactcactcccacctctgtgctgaggctggggccaggcagggagaatcagagtaacagccaggtcttcagtgaagataaagcagtgcctgttggggtgctcggactggacactggggacccatagatgagttagaccaaggcctgacttcaaagagctcctggtctggaggaggtggtcatggacacgatcccttccaaggcgacatgtgttacaatgcaggtagcatgtgacagaggaggctcctgaccttggtaggaaaacggggcatgtggtggcatttgttgctagaggcttccagagaagcggatacctgagctaagcctagtaggatggccaggaggctcctgggcggacactggggacagcatgtccaggcccagaatgtggcacacacagtaacttccttccctccatcctttctgctttcctactcttcttcatttttttttttttttgagacagtttcactctgtcgctcaggctggagtgcagtggtgtgatcttcgctcactgcaacctctgcctcctgggttcaagtgatcctcctgcctcaacctcccaagtagctgggattacagatgtgtgccaccacacccaactgatttttgtatttttagtagaaatgggatttcacca[134 bp omitted]gcctttcctcttcttgtgtctcccgcaggcctcctgcaggccaaaccctgtgctgggcagcactggggtgaggctagcctcgccctggcggggacgcttcttagtctagtgaaagaggcagagaggacccctggtgtccccagatggcatgggccgtgctcgtccactcagccctcagcagatacttgctgagttctgtgatgagggccattgtgtatccgcaaagaggactaagaacaggtcccacttgacactgggcaggagggtgtggtgtcagcctgtctgaaagggcgtgccccacattggaccaaaccttgtggccagggaactggaaggaaaggtctggcgttcagagctattgctggagacagacctgcttcctgccagccaccccaggccaccggcggtagagcgtcctgccctgtgccagtttcaggctgcgcaaccgtgttactgctgagcaccagtgcctgcctgcctgcctgcccatagtcactcctaagcagggtgtcatcccatgctggcacgtgttctgttatcatccccattagacagagggggagactgaggctcagggagcagttcagatcgctcaagatcccacggcgccacctgcacttaagtggtggatctgggatgggagccgaggcagtctgccttcatcacttgtagctatcgtgtgggctccttggccttcgtccctggtccccttcgtccagctctgaggctaaacagctcgtagaggctgggagactgaggtgtggcgaggttctagggtgtaccctctgggcaatgtgggattctaagccaggcctgccggagcaacctgccctgcctggcttctcactcactgtctgcctcatggctgaaccccgctctccagttccccctccccagcgctctgctcagctcggagccaagtccttacatgtaggatggcactgaaccctctttcctggggtgggagaaaagctagtttgccacagagcaggtgtcggggacctggtgccagagcggcttcacctacacagactgcctccttcccaggcatggcgcaggccctgggccctgacacgccattcacagccatcgccggcagtgaaatcttctccctggagatgagcaagaccgaggcgctgacgcaggccttccggcggtccatcggcgttcgcatcaagtaagcgggggacccgaggcgggtgccagaccccagagcctgggagcaaccccgcaccccgggcggctcgtcctttgtcccagagctcatggaaggttgtgattcccgagggtccaggtgtcaggctgtctcctcagatctgctctctggctagggaggagacggagatcatcgaaggggaggtggtggagatccagattgatcgaccagcaacagggacggtgagtctgtgtgagtctgtaccctgctgaggccacctccagcgccagggttggagagagtagatatcaggtctgcactgaggtcagaatcccatggaatgttctagctgcagactagagccatgtacatgcctacagtaggaggtcagttaacttgacaatggcttatccccttatgaaggacattatgggcaatagaaactgaggcggtaaaataatgagagagatctgttagtgagttcccaacagacctcaaaacccaacagacttcaaaactcgttccgtggccgaaaggcatgtcctgtccatcttacatgatacaggtgatttgctctctcttttttttttgttttcgagacagagtctccctctgtcccccagactggaatgcagtggtgcaatctcggctcactgcaacctctgcctcccaggttcaagtgattcttctgcctcagccttccgagtagctgagattacaggtgtgtgcatgccaccacgcccggctaatttttgtactttcagtagagacggggtttcaccatgttggccaggctggtcttgaactcctgacctcgtgatctgcccaccttggcctcccaaagtgctgggattacagccgtgagccaccatacctggcctctttttttttttttttttttttttttacaatttctgttttctcctttttgcatagctgtgttttctgattttgtgatcaacaaaaacactttttatttgggtataaaataggaatgtcaaagtgtgacatttggcaattttgcgagacctcgggcctatgttgtttttgatagactttattttttaggcatgttgtttgtttactatttttattttttatttttattttattttattataattttttttttgagatggagtcttgctctgttgcccaggctggagtgcagtggcacaatctcagctcacggcaagctctgcctcccgggttcatgccattctcctgcctc[199 bp omitted]gagttttggccaggcgcagtggctcacacctgtaatcccagcactttgggaggctgaggtgggcgatcacttgagatcaggagttcgaaacgagcctgactaacatggtgaaac[139 bp omitted]tctactaaaaatacaaaaaattagctgggcgtggtggtgggtgcttgtaatcccagctacttgggaggctaaggcaggagaatcgcttgaatctgggaggcagaagttgcagtaagccgagatcacaccattgcactccagcctgggcaacaagagcgaaactccatctcaaaaataaataaataataaaaacacaaaacaattagctgggtatggtggcacacatctgtaatcccagctacttgggaggctgaggcaggagaactacttgaacccgggagatggaggttggagtgagctgagatcacaccactgcactccagcctgggcgacagagcaagactctatctcaaaaaaaaaaaaaaaaa[131 bp omitted]aaaccccatctctactaaaaatacaaaaattagccatgcgtg[135 bp omitted]caaaaaaaaaaagaactttattgagttttaattgacatacagaaagctgtacacattgcaagtgtccagtatggtccgttgggacatacatgttcagccgcggagccatcaccgcgtcaggctggtgagcgcaccgtatgtcttccctggagagcttccttgtgttgtgcccattttgaagctgtggaagcagaggccagagcagagccagaagcttatcaacactgggggcactggggcaacatcagggccctctctgagccccatccctggcttgtccccactctcagggctccaaggtgggcaaactgaccctcaagaccacagagatggagaccatctacgacctgggcaccaagatgattgagtccctgaccaaggacaaggtccaggccgggtgagcagtcaggggccatgccaggcagccagggggatgggcgagcttgggcccattcctttccttaccctaccccccatccccctgtagggacgtgatcaccatcgacaaggcgacgggcaagatctccaagctgggccgctccttcacacgcgcccgcgactacgacgctatgggctcccaggtgcggccgggactcccgggatcccctcgcccccagcactggggtgttttcatctcctccatcacccccttgacccatggggtctggatcttcctgttaccctgactgtttgtcctggtactcctgggtcttccctgtaaccctaggacagcagggcccctcagcctggcactatagcttcgcatggccacatgtggcctgtggcttctaaggtcctccgggagcccccgtgaccctcagcgctctggaatgtccctagtcctgactacctcctgggcctggggtttccagatgaccccatttagcctcccagctccatttcctggagctccagtctcccccagacagagggctttaggggcccccttcatgcccttccctgccctgtctccgccgttcttcccccacccccgccccatagaccaagttcgtgcagtgcccagatggggagctccagaaacgcaaggaggtggtgcacaccgtgtccctgcacgagatcgacgtcatcaactctcgcacccagggcttcctggcgctcttctcaggtgaggcccctcctgccctgccctgccctgccctgccccaggcctagcagcctccctcgggctccctctgttcctgagctccgagtgtggcccacctgctccacgctgtttcctgtaactccggcccgtggctgcctctgttctccacctgcaagtccgctccgtccccacccctgctggtgctgtgatgggtgtggccctgccctctcccctcctgtgttctctgcctctgttcctcctctttggggatgtttcaggctcctcatccctccttgctttgctccccttcctccatccctggcatcatccttctctgtcttagccacactctggccctggaacccgcctcctctctggcttccctgatgcaacctgtgcctcccataggtgacacaggggagatcaagtcagaagtccgtgagcagatcaatgccaaggtggctgagtggcgcgaggagggcaaggcggagatcatccctggagtgaggacccaggacatggccggggcgggtggtggggtggaggtgggccggggaagtggggacgcgggtggtgactctcacacacaccccaatccaaggtgctgttcatcgacgaggtccacatgctggacatcgagagcttctccttcctcaaccgggccctggagagtgacatggcgcctgtcctgatcatggccaccaaccgtggcatcacgcggtgagccggctacaggggcctctggggaaaacaggatgctctgggcagtgggtgtggtcagagggtcaatgggagcctgtgttgacaccgggtcagggagggacgcgtgactgcagtgtgcgctctttgcttacaaaaggcgggtgggaggcagctctgcttcccgaggaagcccagagactgtgttcttgctgcctttctgtcttgctgctcctttagcccccaaggctgcagtcttcaaactgcgtgccgaggcaccccagggtgctgcaggaaactcacaggagtgctgtgggatgttttctagtcttgagggaagcacagtgacatctgttagacataacataaactacgattgttcagtcacttcgacccagcaactccattaacagaactcttagcgttgtgtttggcctaaggatgccagggacagattcccatgacacagagggtaccgtgctctgctgaagcctgggaacctcatctcccaggtgttgccagcaccctgtgcacggggaactcttaatgttgtgtttggcctgaggatgccggggacagattcctgtgacacagagggtactgtgctgtgctgaagcctgggaacctcgtctcccaggtgttgccagcaccctgtgtagctgggattacgggcacctgccaccatgcccgctggctgtcttctccacctcgccacattttggcccgcaggaagcagggggatgtggagggcaggcagcccccataggctgtgatccacaggctgcaccccaaccttgcacccccattccattgcccggcactgcttgggctcagtgctgtacctggtggcaaagaaggctgggtactgtcagctccagccctgcagccttgggcccagctgaaactgggcggttgggatgggcatcacaaaagggaagaagcgggcaccctacagaggatgctgggccgctgggcctggctctgtgtttggctcttttaactccttggatccgcagaagaagctcagaaggtagatatcacctcagccccattttatagggcaggacagtgaggcccagtgacttgcccaggtcacaagtctagaaggtagcagggccgtaatttggtctctggatggctggacactggaagagacccccagggctgatggtgttttcacagaaactgcaggtcagggcctggggactgcccaggggcacctcctgtgggaggcagcagctacgggcagccctgattgttcgtagactctgtatctgagaatctcgcttgctaagatttatttgtaatccccaaataaatatctgccctgctttcggcaacaaattcaagtcacctgacacccactttcccagctgagtgtgaacgaggcaacactgcctgctcccttagcgctcatgctgtaaataagtgtccttgttgtattctatttagtgctacgtttgtcacttttgttctttgagacagggtcttgctctgtcgcccaggctggagtgcagaggcacgatcatggcacactgcagcctcagtgcccaccacacacacacacacacacacacacacacacacacacacaccacccctgggactcaatcagtcctctggcctcagcctcctcatcagctgggaccacgggcatgcaccactatgcctagctaatttctgtttttgttttgagacggagtctagctctgtcaccaggctggagtgcagtggcacgatctcggctcactgcaacctctgccttctgggttcaagcagttttcctgcctcagcctcctgagtagctgggattatgggcacccgccaccatgcccagctaattttggtatttttagtagagacagggtttcaccatattggccaggctggtctcgaactcctgacctcgtgatctgcccacctcagcctcccaaagtgttgagattacaggggtgagtcaccgcgtccggcctaattttttttttttttttgtagagatggtgttttgccatgttgcccaggctggtctcaaactcctgggctcaagcaatccacccgcctcagcctcccaaagtgttgtcactttttttgtgccttttttttttaaactttttggggccatttgttggtgatattgccatttaaagtgtcccctgtgcacagtgttgaagtgctgtctagtatcctaagtgcaaggaggctgtgaagcctgacggagaaaatgccatgttacagacgcttcgctgagcccaagttagaatgctgttgacacgagctccatgttagagaataaacagtgatgttacataacaaa[131 bp omitted]aaaccctgtctgtattaaaaatagaaaaaactagctgggcgtgatggcgtgcgcctgtagacccagctacttgggaggctgaggcaggaggatcggttgaacccgggaggcggaggttgcagtgagccgagatcgcgccactgcactccagcctcgcaacagagcgagactccgtctcaaaaaacaaaccaaaaagaccagaaacacacaaatgaaaatacgcatagacccagattatatatatatggattgatgaaaatactgtaagccgaggctcgagagagcctaaccctgtattccagtaggagcagtggctcaggatcagctaattggagtgttcacgatgactttctagaacctcactactgtgaataaggggaactgactgtatcccctggcaccagccctgggctggccccgctgcagcagggaacaagacaggtgcagtcccctcctttgtgaagctttgtgtcgagcacgggagtgggaccttgatccagtaatcctggaggcagagatctagcttaaagcagcccagctccgcggaaaggtgcccttgggggactgacgcagctgtggaaggctgcgtcatcaggggtgatgtcatcatgtgacaggagacgcgagctaaaggttaagtggtgttgggcccagtgagtgggtggcgatgggaggtgagagtgttcccagcaaagggaatgaagagggaacatgcccctgacagccccctctttctgcctcttcctcagaatccggggcaccagctaccagagccctcacggcatccccatagacctgctggaccggctgcttatcgtctccaccaccccctacagcgagaaagacacgaagcagatcctccgcatccggtgcgggcaggaccaggccgtgcgcctgagacgcagggctggggtctaccctgtttgacaaatgctgacactgaggtccagcggagtggcatggtggctgggcctacaggagagagggctgagcgggcacccagacggtggcctccgatccgggagcaggagccacggtgggaaagggaggcgaggtacccgtgactggtgttggggccagcgccctgggggtggtcaggaggcctcggttttaggtccagcccagcccctgtctccgtggctcttctagcctcagcattctatggttctaagatgcaggcgccacatattcccagtggggaagggccagagggttgctgtggccacttctgctgcagtcagaggctgggccccggctgagccacccctgtcccccactgcttgcaggtgcgaggaagaagatgtggagatgagtgaggacgcctacacggtgctgacccgcatcgggctggagacgtcactgcgctacgccatccagctcatcacagctgccagcttggtgtgccggaaacgcaaggtcagccggccgaattagccagcagggccagatggcggcagtgagtgacacagtacttcaggggcttccagggttccgatttcatcctagaatgtacgttttcagacgcagggaattttcatccctcaggttggcttctgtatcatccagcctggcctatagtaggtatcagtaaatctctcttgacttaagtagatgctgttaggtccaccttacagataaagaaactgaggaatgaagaggctgggcccacaacaaggagatggccaggcaggatttgaacccaggcaatctggcccagaatgccctcccctcacatgccacactctgctgcctagagcatggaggtggcatacgctggggtctgtgccttgagcctcacggagaggggcccaactgaggactcgccctccccctccagggtacagaagtgcaggtggatgacatcaagcgggtctactcactcttcctggacgagtcccgctccacgcagtacatgaaggagtaccaggacgccttcctcttcaacgaactcagtaagaatccccaccccgcacctgcactgccagagccaacctcagagggaggaagagggagctcggcgtagaaggctcaggccctgccacctgggcgacactgaccatgtggccttccttctccccacagaaggcgagaccatggacacctcctgagttggatgtcatcccccgaccccaccctgttttccaccagagttctgacactgtgactctgtataaaatggttgggaagctgcacccaccctgtgtatgtgtggttgccctgagcccacagaaagacacctccagagtgcggattgagaagcctttattgtgggaggatcggggtgtcagggctccaggagtcgggatggacttggaaggctgcggggagggtctttagaggaagaggaggcctgagagttgggggtggtcacaggtcaaggggtggtctttgggacccccacagtcagaggtgctgcggcggcagggtccacagcgacagctgagagccacagggaaggagaccacggggtccacaccacgcgggcagccagggagccggatggactcgaagcgcacatcacggtaggtgcacaccacctgaggcaggggcggcaggaccgcctgcagcacgcgcatctggaggccgtgtgagtgggggaatgagcatgtgcctgaggccagcgcctcagctgagctcccaagctgaccccacaggtcctggactcaggagcccaggaagccctctgttcctgccttcccacaccccattccccaaccgcaggccagagaggcagaccacccttcctcccccgctgcctctgtgggtctggccctgaggtggcagcatctgcccctggccccaggcagctcaccatggtggggcagtagccggcacagatggtggtgttgacggtgatgcacactgggcagccctccttctcgacagccaggatggcattgatggggtggcaccatggccgaagcggctccctggatgcccatgccccgcccatgctcagcagcagcaacagcagcagcccctgggacaaggacactgcttcacccaggtctgagaccgcagccccgagtcctggccttcccatcccgcgtggtacaccacccacaaagacccagagacccttcccggcatctcctattcaggacccaccacccggacacctgcctttcagagcccaccccacagcccagaggacctgagatgccccaacatttcagatccccaccctcaggaactgccccacctgaagcttactgggggtcatgcccctccagaaagaggcctccttccacagctcacacgggtctgccccttctcatgccagtgatggcctggaaggaggtggaaggtgcccaggggccctgtagtcttacctggagcatctccatccttggtgcatcccctgcctcgtgtatctggctatatacctcggggttgtgggggcggcaaggccaccaggaggtgataggatgctggggtaacctggacactaatccccccgggggcgagaggtgcacatggccagggaggcgcaggagtggctcagcagagcgccccagccctctcccctcagtggtctagcgccagaggtgaggcagagaccacggtgaagtgacctcagagacccagttgtcgagtgctagggactagtcgagcctggaggcacagggagtagggtgtaggaaggcctgcctctgccaattgtggggtcttgggagccaggaggaggccatgacccgagaaaggtgctggactgaagcctcaaccctccacttgaggctttcctgcaccacagtccaacctaacaggaggggcgctgcttcggacttagcttctgcccagtgagagagggtctccccgtgactgtgctgccagggaagccacttgacccagatgcccccaaggagggattaagcccgagccccacctctcccttagggacctccgcccaccctaccctcaagccaggatgcccggagcgtccccggaagtgggtgtggttcaggtgatttaactcattatttaatacgcccgcagggtgcgtgtcttgcccccggggccacagcctgcaaggacattatctggacttagtcccctctccgtgatgccgcagctgagtgggtgtctgggctagtcccgcccccacgttgccaatagacgtaatgagtgcgactcaggctgggtccggaacccttcctagtgagcggaggtcccgagctccgctcggcagcgcggccctgggggcgggtctggggtggggctggccctgacggctcacaccagcgccggcttcaagctgccatagctggagttctcggtactgtaggctttcggcacgctgtagatgccccgcaggggcttccagtgcgggccgccccagggcgcctccagcgggcagaagcggtcgagccgccggagcgggtgcagcagggggctgtaggactcctgagccagagacagggctccccggtgcggcatggccgaggtcaccgggctgacgcgcggcacgcggacccgcggtggtcggggcggccgggaggagcgcggacagggcggccgctgcgggccgtggctccagacctggggcgtctcttcgaagctccagtaggtcagggagtccttgcgggggtatccggacagctccgtcctgtgggagcagggcgggatggtgaggatacagctggatccttggggacgagtttcagacctcgggatctaaggagtctgcacattcaaactcctgcatttccaggcgagcaccccttaggaaggacgcgacccggcacgcgttgcctgcgttcctgggtcctcgaggtacttaacgtcctggaaactgagctttcgcatcctagggaagtaaaaggggactttcgcttccttgggaaggagtatctgggggctcaagtaccgaaggaggccctgccctcagatccggaatcccctcgagccgctgtgcaggcttcctgtccctaccgcggttcctgagaggtgacactaaggactcctgggtgcttaaaaaaaaaagggaggggctgaggcctgaactttggttcttgctgctacagaagtcgaggctgagaccaccggctcagggaatgggagccagcccaggggctcggcgtgcaccggccacggcgggggctgtgcaggaggcggtgccgagcgagagcccggcttacttgggatagaaccgaaagtcccgcgccgaggtggtcagatagagctggcggcggtccaggacgccccggtcggatactgtgaaaggccggccagacagctcggggttcttcgtccaggcaattagagcctgagcaagattgggggaggaggcatacccaagacatagatttcataccccatcccaagccctgggtcccgagttcagaatccctctccttcggcctcgacagccatgacggccacggccctcacaccccgccccagggttagagcccttcctgccacccacgccagggaacttcagcttcctttctcatacccgaacccttcccagcctcacctccctaaatccaagcaccttctgctgttcaaggaactcaaacccaagcccccagccaccaaaaacaacctccctggttccgctctgtcttaaaccgtcttggtgtggccactggagctgagctgcatcttgggcagcaactccaagttacctctcccaactcccacctgaccccgtctcagaatattctagtctcctccccacccacagcccgccgtctagctccgcagcagcttaggagccctgaaggtgagtttgtagtccctggtccttctggcctggcctaatgcccagcccctcccccggctcctctaacctcgcgatcccgccccagaccctttagccacgccccaaagccgtgattccttctggccccgccccaggctcccggagctccgccccgtctcgccggcgccggcttccacccagacacctgggaaggacccccgcggtggtggtctgcgagttgtgggggctggggcccgaagtattccggggcgcgcgggtccccgctgggagagccagtgtactgcgccctcgtctcgctgctctggtactttgtggtcagtgggaggcgccagccgcggtgtctgagctgcggaaaggcgacccagagactcacgtgaaggagcaggggactcaaatgcagtcccccgccctgtcccctgcggactccggcactccccaaactttaccttttctcctaaatccttgatccccacagtccgcgtggggtctgcaggctctggggctctgggctgggcgcagggcccgccatgggtcttgggcacgtaggccgagccagaggttgtctcccatctgctgaggacctcgtcgaaagcccagttgtgagaatcctgctttgcaacttggggtagagggtccgcgaccgtggactggagagaaggcgccgcacatcagctagaaagactcaggagtccctatcaccccccaccccaaactctgacctcttccagtcggcccccagccctttcctctgcagtccctggcattcagcttccctggtgcctcctctctcagacccagaactccaggaccctcctccttcagagaggagtccaagctcccaatccgctttatttagcccctatctttctgggtctccaggcccggcagggctgcagcgtagggtccgctcacctgcaccgtgggcggggtgaagggtatgggtgggataatgcggtgggaaaagtagctgctggtgagatggcagttgggcctggatccaggtacctcggttgcagagatacgacagcccggagccagggtgccactggccatggttccacccccactccgtagccaagcaggagctggcttattgtggttgttgccccaggtgacagaacccgcccacccagaacctagtcaatcaagggcctgcaggcacctggatggatggaatgagaaagagacccagagacagggaccccaagaggggtacaaagaaacacaaggagggggaatggagactcaaagataggagggtggaaagggaaggagaagttcagtatttcagagacccagggggtgggggagagagaaacccaaaaagagggacagggacctggaggtgtcagagatccagacagagagacagagacccctgcgctgcacctagcaactcaggacatccatgagaaacacccccctttcttccagggcccagatgctcctggctgcttcctccctctaccaggcctgcccacctcagggtaacgatttccagacatccccggggctccccgaccctccctgcatgcacgtgctgaagtaatcagcactagcattggctgtcctgcctgcctttgattggcttgaaaagttccacctgggtaggcggggtgtggaaacagggaggcacccacagagaagtgcaccggaccatagcgaaaaacatgggctttgatgagtgagaaagaaatacaagagaggagagagacagggaggaagacacagaccacgctggaaacggagctattagtactcacccagaggctagagccaccggaagttagagacagagagaaaggcggcaaaaaagagcaaaatcagagatggtaacaaggagatgtagaaacggaggcagccacacccctccctgccgaggggcctggtctgtacagattggtggagggggtgcctatgtcctttgctcaaagctggacctgagagagagagagggggagagaaagtgagagagagagagtgtgtgtgtgtgtctgtgtctgtgtgttggcaacacatgtggggagatgggtaataggtaaagggctattgtgaagtcctgtggtctgtcccagacagagagaaagagagagagagagagagagacagagtgtgtgtgtgtgtgtgtgtctgtctgtgtgttggcaacacatgtggggagatgggtaataggtgaagggctattgtgaagtcctgtggaccagagagagagagagagagtgagtgtgtgtgtgtctgtatgtctgtgtgttggcaacacatgtagggagatgggtaataggggtcataggtgaagggctactgtgaactcctgtggtctgtccctggcttcccttgtcatttcttcaccatatagagcttttggtcaccgggcacgatgactcactcctgtaatcccagcactttgagaggcagaggcgggcagataacttgaggttaggagtttgaaaccagcctggccaacatggcaaaaccctgtctctatcgaaaaatataaaaagtagccaggcatggtggcgcacacctgtaatcccaactaaggcaggagaatcacttgaactcaggaggtgaaggtggcagtgagctgagatcatgccactgcactccagcctaggggacagagcaagactccatctcaaaaaaaaaaaaaaaaatagcttttggtctaggcctctgcctcctcaaccctcattatctcatcccacgagcccattcttcagacaaggaaacctgaggctgccttctgcagccaggcccacaatcccacttactgttcctccctgaatcatgcttctggggcccttctgttggattttgctgaccctactcaagggctctcaatgacgaataaccccctgatcctagccagggggacggcgagttagtcagaacctcatgtcccactcaaactggacaatttttttttttttttgagacggactttccctctttttgcccaggctggagtgcaatggcacagtctccgctcactgcaacctccgcctcccgggttcaagcgattctcctgcctcaccctccagagtagctgggattacaggcacccgcctacacgcccagctaatttctttatgtaattttagtagagacggggtttcaccatgttaaccaggctggtcttgaactcctaacctcaggtgattcgcctgtcttggcctctcaaagtgctgggattacaggcatcagccatcgcacctggccatcaagctggaaaattttaaggtctgtttctttcccaatgtagagtaaagttgcgatgtcatcccccgaccccacactgttttctaccagagttctcatactgtgactctgtataaaatggtttggaagctggacccatcctgtgtgtgtgtggttgccctgagcccacagaaagacacctccagagtgcggattgagaagcctttattgtgggaggatcggggtgtccgagggccccgggagtcgggatgggcttggaaggctggggggaggggcctttgaggaagaggagtcctggaagcgggggtcatcacaggtcaaggggtggtccttgggacccccgcagtcagtggtgctgcggcggcagagtgcacattgacagctgagagccacggcgtaggagaccacggggttcacgccgcgcgggcagccagggagccggatggactcgaagcgcacatcgcggtagttgcacaccacctgaggcagggccggcaggaccccctgcagcacgcgggtctggaagccgtgtgagtgggggaatgagcatgtgcctggggccagcgcctcagctgagctccccagctgcccccacaggtctcagactcaggggtccaggaagccctctgttcctgccctcccacaccccattccgcagcccctgaccagagaggcagaccacccttcctcccccgctgcctctgtgggtctggccctgaggtggcagcacctgccccggccccgggcagctcaccatggtggggcagtagccggcacagatggtggtgttgacggtgatgcacacggggcagccctccttctccacagccagggtggcattgatggggcggcaccgtggccgaagcggctccttggatgcccatgtcccgcccatgctcagcagcagcaacagcagcagcccctgggacaaggacactgcttcacccgggtctgagaccgcagccccgagtcctggccttcccatcccgcgtggtacaccacccacaaagacccagagacccttcccggcatctcctattcaggacccaccacccggacacctgcctttcagagcccaccccacagcccagaggacctgagataccccaacatttcagatccgcaccttcaggaaatgccccacctgaagcttactgggggtcacgctcctccagaaagaggcctccttccacagctcacactggtctgaccccttctcatgccagtgattgcctggaaggaggtggaaggtgcccaggggccctgcagtcttacctggaacatctccatccttggtgcgtcccctgcctcgtgtacctggctttatacctcggggttgtgggggcggcaaggccaccaggaggtgataggatgctggggtgagctcgacactaacccctcggggggcaagaggtagacaaggccaggggggcgcaggagtggctcagcggagcgccccagccctctcctctcactggtccagcgccaagggtgaggcggagaccacggtgaagtgacctcagagactcagtcgtcgagtgctagggactagtcgaggctggaggcacagggagtagggtgtaggaaggcctgcctctgcctatggtggggtcctgggagccaggaggaggccgtgacccgagaaaggtgctggactgaagcctcaaccctcctctacttgaggctttcctgcaccacagtccaacctcccaggaggggcgcggcttcggacttagtttctgcccaatgagagagggcctccccgtgactgtgctgccagggaagccacttgaccctggtgccgccaacgagggattcagcccgagccccacctctcccttagggacctccgcccaccctaccctcaagccaggatgcccggagctgtccccggaaatgcgtgtgcttcaggtgatttaactgattattgaataggcccgcaggaggtgtgtcctgcccatggggccgaagcctcggaggacattatctggacttagtcccttccccgcgatgccatcaagctggacaattttaaggtctgtttctttcccaatgtagggtataggttggcacagggaagagggctagaaacctgacttgagctccccgcccagggctgaactctccagcatcctgatcacttctcattgaaccttgcttatactccccgtgtgatcggtagctctttatctcaaaacagaatattctaagccaacccctgcctgctctcaccaagtaagatttctcatttgaaccccagctcccagatacttaaaggccttctgtagaccatgtcctcaaggtcccctggccatctgcttgcatgttccagtttccctcctcccccatgcacatcgtgaaatgtgccctcccactccccaggatgagcaaggtggtgtcctctgtgactgagcagtcagcaacttaacaccaaaggtcaccaatgatcaaatccatgagagttgatccgaggagttatgtattagggctacgaaagagtaaacactcagtaaatagtggctattattattatcatcatcatcatcatcatcatgattaccctcaagttcccctgggagagctcctattcaaccttcaaaaccacatgtggtggcacccatcctgcagagattgagctcaaattcagagagttgtgattttgtgatgatttgatgagttccccaactggggtccgtccgtagagcagctgggccaaccctgaggtctctcagcatccagctctgttctttttctgcctgaccagttcctgggtataagtctcaggcccggccagtccggctgaggagtgtgcagacacaggctgtgccagtttgaatccatcgccagtccacacggccctgggcatcagcggtcaatgcccgcacataggactgcttggccttgcactcagacacccagtgccccccggtccacaccccggcggcagccccctccacctacccccgggccaccttcctcagatttatcggcctcgaagtgggcaacaaagaagtgctggcggagggaactgccgacagctgcaggcacctcgcccaacacctccacctcgagcacacccaagtccacagcagtccaggggtctgtcacccagacactgactgcatcgcacacggccagctcaccctgatgactcgccggtgaagtatcgctcacccctcgctggctgcggttggcccgggcgcctgctgactcccgaaaggctccagtctccagcaggaagaccagagggggcccggcagcggcacccctagacaggaccactcgggggaaaagaaggtcccactctggaggaggaaaaggcgacaatgtcgaggatggggttaggactccattgacacactggggaggaggaaaatgagggggatgcggagggagcctgggggagtgggagcatctctcagagcatctctcagagcacatggagacagggaaaaggaggctgggattagagaagaggataaacacttcagtggggtcagaagttggaaaccccaggggaggcctgcctgccaggattatggggaagcccttgctctagaagtttgggggactccatatataggacttgcatcacacccaacttgtagattaataataaatattcaacaactacaggtcaggcactatggctcacacctgtaatcccagcactttgggaggctgaggcgggtggatgacttgaggtcaggagttcgagagcagcctggccaacactgtgaaacaacatctctactgataataccaaaattagccaggcctggtgctgcacgcctgtggtctcagctactcaggaggctgaggcaggagaatcgcttgaacccgggaggccgagattgcagtgagccaagatggtgccactgcacttccgcctggacaacagagtgagactctgtctcacaaaaaaaataaaaataaaaataaggccgggcatggtggctcacacttgtaatgccagcattgtcggaggctgcagtgggtggatcagctgaggtgaggagttccagaccagcctgaccaacatagagaaaccgcacctctactaaaaatacaaaatatcctccagcgtggtgctgcatgcttataatcccagctacttgggaggctaaggcaggagaatcacttgatcccaggaggcagaggttgcagtgagccaagatcgcgccattgcacttcagcttgggcaacaaaaacaaagctccatcttaaaaaaataataataataatcataaaataaagataaaaatgttcggccgggtgcagtggttcacgcctgcaatcccagcgctttgggaggccgaggtgggtgcatcacctgaggtcaagactttgagaccagcctggccaacatggtgaatccctgtctctactaaaaaaaaaacacaaaaattagctgggtatggtggtgcgcacctgtactcccagctactcaggaggctgaggcaggagaatcgcttggacccatgaagcagaggtgtagtgagccgagagcgcgccactgcactccagcctaggtgacagggccagactccgtctcaaaaaaaataaaaataaaaataaaataaaaataaaagtagaaaatattcaactactattactcaatagcaacagatggtaaaatacaggctcagagaaattaatgatttgtgcctggtcacacagccaacaaatggcagagatgggacttcacctctgggcaactgcactctgctatccttcctgtagaactctgaggaaccgagggtcttgcaccctggaggatgttccaatcaatttttttttgagggggtgtctcacttgtcgcccaggctggactgcagtggcgcgatctcggctaactgcaggtccacctcccgggtttacaccactctcctgcctcagcctcccgagtagctgggactacaggcacccaccactatgcctggctaatttgttgtattttttagtagagacggggtt[133 bp omitted]gcctcactctgtctggccaggctggagtacagtggcacaatcctggctcactgtagcgcctgcctcctgggttcaagtgactctcctgcctcagccttctgagtaactggaattacaagcgcctgccaccgtgccctgctaatttttgtatttttagtagagatgcagtttcacaacattggccagactggtctcaaactcccaacctccagtgatactcctgccctggcctcccagagtgctgggattataggcctgagaaaccacgcctggccccaaacaaattgctttaagacgaggtctccctatgtttccccactgcacttgaactcctgggctcaagccatcctcctgctgtggctcctgagtagctgggactacagactcaagccaccacgcctggccacattccacaatttagagaaagtgcacaacctggaatcctagggagaccccgattcacctcaaaactgccactaaggaggtaaaacgctgcccctctgaggcaggcttcagtttccctgtgtgtgaaattgacctggcgctgggagaggctggtggaggcgcggattttgcagtttccctacaacattctggaagcctgtggttctgggaaaggttggcgtggagaagactgggaaacaaccagtggtcaccagagctgtagcacctcctccacctccgagctctggggctgggaaccccaggcttcggggcccctgtggaggacgcaggtggccccctctttcctgacatctcaggagagggaggggcaaccggctagcagaagaaaagcacaggaaggttatacagccaggtggggaaggggccaaatccctgaacaaccccttcccagagttcctcttcaagtgcagggtacccaagagtcaaggccccgccccctttccagaggccccttttctacccaggtgatgggtcctagctgggatgggaggcagatggacggaggggaggggggaggaggggaagggagaggcagtggatgaaggaggatggaagagatgacatccccctcggcccattcatcccattcaggtccccaagccgcgcccctctccgccccacctgcactgccagtgccaacatcagagggaggaagagggagctcggcttagaaggctgaggccctgccacctgggccacaccgatcacgtggccttccttctccccacagaaggccagaccatggacacctcctgagctggaggtcatcctgcatctccaccctgttttctttttctttctttctttctttttttttttttttttgagatggagtctcgctctgtcgtggaggctggagtgcagtggcgcgatctctgctcactgcaagctccccctcctaggttcactccattctcctgcctca[133 bp omitted]ggcctcccaaagtggtgggattacaggagcgcagcaccacgcccagctaattttggtattaacagtagagatgttgtttcacagtgttggccaggctgcttttgaactcctgacctcaagtcaaacacccgcctcagcctcccaaagtgctgggaccacaggtgtgagccatagtgcctgacctgtagttgttgaatatttattattaatctacaagttgggtgtgatgcaagtcccatacatggagtcccccaaacttctagagcaagggcttccccataatcctggcaggcaggcctcccctggggttcccaacttctgacctcactgaagtgtttatcctcttctctaatcccagcctccttttccctgtttccatgtcctctgagagatgctcccgctcccccaggctccctctgcatccccctcatttgcttcctccccagtgtgtcaatggagtcctaacccccacccttgacattgtccccttttcctcctccagagtgggaccttattttcccccaagtggtcctgtctaggggtgccgctgccgggccccctctggtcttcctgctggagactggggccttttgggagtcagcaggcacccgggccaaccgcagccagcgaggggtgagcgatacttcaccggcgagtcatcagggtgagctggccgtgtgcgatgcagtcagtgtctgggtgacagacccccggaccgctgtggacttggttgtgctcgaggtggaggtgttgggtgaggtgcctgcagctggcagcagttccctccaccaacacttctttgtcacctgcttcaaggccgataactctgaagaaggtggcccaggggtaggtggaggggctgccgctggggtgtggaccggggggcactgggtgtctgagtgcaaggccaagcagtcctatgtgcgggcattgaccgctgatgcccagggccgtgtggactggcgatggattcaaactggcacagcctgtgtctgcacactcctcagccggactggccgggcctgagacttatacccaggaactggtcaggcagaaaaagaacagagctggatgctgagagacctcagggttggcccagctgctctacggacggaccccagttggggaactcatcaaatcatcgcaaaatcacaactctctgaatttgagctcaatctctgtaggatgggtgcaacaacgtggggttttgaaggttgaataggagctctcccaggggaacttgagggtaatcatgatgatgatgataataataatagccactatttactgagtgtttactctttcgtagccctaatacataactcctcggatcaactctcatggatttgatcattggtgacctttggtgttaagttgctgactgctcagtcacagaggacaccaccttgctcatcctggggagtgggagggcacatttcacgatgtgcatgggggaggagggaaactggaacatgcaagcagatggccaggggaccttgaggacatggtctacagaaggcctttaagtatctgggagctggggttcaaatgagaaatcttacttggtgagagtgggcaggggtcggcttagaatattttgttttgagataaagagctaccgatcacacggggagtataagcaaggttcaatgagaagtgatcaggatgctggagagttcagccctgggcggggagctcaagtcaggtttctagccctcttccctgtgccaacctataccctacactgggaaagaaacagaccttaaaattgtccagcttgatggcatcgcggggaagggactaagtccagataatgtcctctgaggctgaggcctcgggggcaggacacacctcctgcgggcctattcaataatcagttaaatcacctgaagcacacgcatttccggggaccgctccgggcatcctggcttgagggtagagtgggcagaggtccctaagggagaggtggggctcgggctgaatccctcgttggcggcaccagggtcaagtggctaacctggcagcacagtcacggggaggccctctctcattgggcagaaactaagtccgaagccgcgcccctcctgggcgaggaggttccacctcctaggttcctgtgattctcctgcctcagcccgagtagtgggacatcccacttgctcccgccattctgtttaccacaggtgacgaccgccatggctgacaggcagggaggtcccccgaggaccgagcaagcctcggtctcccaaaaaaaaaaaagatacattgaagtaatttaaaaacacttaggaagatgtcatttcttcctatcaaggcgtcctccctttatgttttgttattatatagggaacgataaaaaaatttttttctcaaccaatgtggacccggttggcctcgaactcgtaccctcgaaccctcccctccctgagggcccgagggcacgcgcaaccggtcggagccacaatagctcggggtgtcggggatctcctttcttccttttgaccttacgcagggtgatggagccaatcaggagaggctcacccctgacgtcacccagtccccagggccagtgagggccctgcgttccgtggcgccccctggagggaggaaggggaactgtatctgagagagagcagccaattgggtccgctgactccggccgggttcccgtgccgcgtccaacacccctcactccctgtctcactcccccacggagactcaatttactttccatgtccacatccccagtgcttgcggaagatatcccgctaagagagagacatgtcaaaggtagggtagatcgacatttccaggcaccaaagatggagatgttccaggaaagactgcagggcccctgggcaccttccacctgcttccaggccatcactggcatgagaaggggcagaccagtgtgagctgtggaaggaggcctctttctggaggagcgtgacccccagtaagcttcaggtggggcagttcctgagggtggggatctaaaatgttggggtatctgagatcctctgggctgtggggtgggctctgaaaggcaggtgtccgggtggtgggtcctgaataggagatgccacgaagggtctctgggtctttgtgggtggtgtaccacgcgggatgggaaggccaggactcggggctgcggtctcagacccgggtgaagcagtgtccttgtcccaggggctgctgctgttgctgctgctgagcatgggcgggacatgggcatccaaggagccgcttcggccacggtgccgccccatcaatgccaccctggctgtggagaaggagggctgccccgtgtgcatcaccgtcaacaccaccatctgtgccggctactgccccaccatggtgagctgcccggggccggggcaggtgctgccacctcagggccagacccacagaggcagcgggggaggaagggtggtctgcctctctggtcaggggctgcggaatggggtgtgggagggcaggaacagagggcttcctggacccctgagtctgagacctgtgggggcagctggggagctcagctgaggcgctggccccaggcacatgctcattctcccactcacacggcttccagacccgcgtgctgcagggggtcctgccggccctgcctcaggtggtgtgcaactaccgcgatgtgcgcttcgagtccatccggctccctggctgcccgcgcggcgtgaaccccgtggtctcctacgccgtggctctcagctgtcaatgtgcactctgccgccgcagcaccactgactgcgggggtcccaaggaccaccccttgacctgtgatgacccccgcttccaggcctcctcttcctcaaaggcccctccccccagccttccaagcccatcccgactcccggggccctcagacaccccgatcctcccacaataaaggcttctcaatccgcactctggcggtgtctttctgtgggctcagggcaaccacacacacagggtgggtccagcttccaaaccattttatacagagtcacagtacagaactctggtagaaaacagggtggacggctgggcgtggtg[131 bp omitted]gtggcgggcgcttgcaggagaatgcagtgaacctgggagcgggaggttgcagtgagcagagatcgcgccactgcactccagcctgcacgacagagcgagactccatctcaaaaaaaaaaaaaaaagaaagaaagaaagaaaaagaaaagagggtggagatgggggatgacatccagctcaggaggtgtccatggtctggccttccgtggggagaaggaaggccacacgattggtgtggcccagggggcagggcctcagcattctaagccgagctccctcttccaccctctgaggttggcactggcagtccaggtgggggcttggggacctgaatgggatgaatgggccaagggggatgtcatctcttccattctccttcatccactgcctctcccttcccctcctcccccccctcccacccccggtccatctacctcccatcccagccaggagccgtcacctaagtagaaaaggggcctctggaaagggggcggggccttgactcttgggtaccctgcgcttgaagaggaactctgggaaggggttgttcagggatttggccccttccccacctggctgtataaccttcctgttcttttcttcccctagccggttgcccctccctgtcctgagatgtcaggaaagagggggccacctgcgtcctccacagtggcctccgaagcctggggttcccagccccagagctcagaggtgaaggaggtgctacagctctggtgaccactggttgtttcccagtcttctccatgccaccctttcccaaaacaacaaaacaaacaaacaaaattgggcctggcgcagtggttcatgcctgtaatcccagcactttgggaagccgagacgggcggatcacaaagtcaggagatcaagactatcctggctaacatggggaaactccgtctctactaaaaaatacaacaaattagccaggcgtcctggtgggcgcctgtagtcccagctacttgggaggccgaggcaggagaatggcaggaacccgggaggcggatcttgcagtgagccgagatcgcgccactgcagtccagtctcaacaacagagcgagactccgtctcaaaaaaaaaaaaaaaattgattggaacatcctccaagatgcaagactctcagttcctcagagttctacaggaaggatggcagagtgcagttgcccagagttgaagtcccatctctgccatttgttggctgtgtgaccaggcacaaatcattaatttctctgagcctgtattttaccatctgttgctattgagtaatagtagtggactattttctatttttatttttattttatttattttatttttttttgagacggagtctcgccctgtcacccaggctggagtgcagtggcgtgatctcggctcactgcacctatgcttcccgggttcaagcgattctcctgcctcagcttcctgagtagctggaactacaggcgcgcaccaccacacccagctaatttttttttttttttttagtagagacagggtttcaccatgttggccaggctggtctcgaagtcctgaactcaggtgatgcacctgcctcggcctcccaaagtgctgggattgcaggcatgagccactgcgcctggacgaacgtttttaattatattattattattattattattattattattactaatttttgagatggagctttgtttttgttgcccaggctgaagtgcaatggcgggatcttggctcactgcaacctccgcctcctaggatcaagagattctcctgcctaagcctcccaagtacctgggagtataggcatgcaccaccacgcccgacgatattttgtaattttagtagagatggggtttctccatgttggtcatgttggtctggaacccctcacctcagctgatccacccaccgcagcctccgacaattacaggcgtgagccaccacgcccagccgtccaccctgttttctaccagagttctgtactgtgactctgtataaaatagtttggaagctggacccaccctgtgtgtgtgattgccctgagcccacagaaagacacctccagagtgcggattgagaagcctttattgtgggaggatcggggtgtcctagggccccgggagacgggatggacttggaaggctggggggaggggcctttgaggaagaggagtcctggaagcgggggtcatcacaggtcaaggggtggtccttgggacccccgcagtcagtggtgctgcggcggcagagtgcacattgacagctgagagccacggcgtaggagaccacggggttcacgccgcgcgggcagccagggagccggatggactcgaagcgcacatcgcggtagttgcacaccacctgaggcagggccggcaggaccccctgcagcacgcgggtctggaagccgtgtgagtgggggaatgagcatgtgcctggggccagcgcctcagctgagctccccagctgcccccacaggtctcagactcaggggtccaggaagccctctgttcctgccctcccacaccccattccgcagcccctgaccagagaggcagaccacccttcctcccccgctgcctctgtgggtctggccctgaggtggcagcacctgccctggccccgggcagctcaccatggtggggcagtagccggcacagatggtggtgttgacggtgatgcacacggggcagccctccttctccacagccagggtggcattgatggggcggcaccgtggccgaagcggctccttggatgcccatgtcccgcccatgctcagcagcagcaacagcagcagcctctggggcaaggacactgcttcacccgggtctgagactgcagcccccagtcctggccttcccatcccgcatggtacaccacccacaaagacccagagacccttcccggcatcttctattcaggacccaccacccggacacctgcctttcagagcccaccccacagcccagaggacctgagataccccaacatttcagatccgcaccctcaggaactgacccacctgaagcttactgggggtcacgctcctccagaaagaggcctccttccacagctcacacgggtctgccccttctcatgccagtgatggcctggaaggaggtggaaggtgcccaggggccctgcagtctttcctggaacatctccatctttggtgcccggaaatgtggatctaccctacctttgacatgtctctctcttagcgggatatcttccgcaagcactgggaatgtggacatggaaagtaaattgagtctccgtgggggagtgagacagggagtgaggggtgttggacgcggcacgggaacctggccagagtcagcggacccaattggctgctctctctcagatgcagttccccttcctccctccagggggcgccacggaacgcagggccctcactggccctggggactgggtgacgtcagggatgagcctcttgtgattggctccatcaccctgcgtaagatcaaagggaagaaaggatgggcccgacaaccggagccattgtggctccggccgattgagcctgccctcgggctctcaaggctaggcgagggtgtgagggactggagttcgaggtcaacctgggccccattggtaggaaaaaaaaaaaaaatttttttatcgttccctatataacaacaaaacataaagggaggacgccttgataggaagaaatgacatcttcctaagtgtttttaaattacttcaatgtatctttttttttttttttgggataccgagccttgctcggtcctcgggggacctccctgcctgtcagccatggcggtcgtcacctgtggtaaacagaatggcgggagcaagtgggatgtcccactactcgggctgaggcaggagaatcacaggaacctaggaggtggaacctcctcgcccaggaggggcgcggcttcggacttagtttctgcccaatgagagagggcctccccgtgactgtgctgccaggttagccacttgaccctggtgccgccaacgagggattcagcccgagccccacctctcccttagggacctctgcccactctaccctcaagccaggatgcccggagcggtccccggaaatgcgtgtgcttcgggtgatttaactgattattgaataggcccgcaggaggtgtgtcctgcccccgaggccgcagcctcggaggacattatctggacttagtcccttccccgcgatgccatcaagctggacaattttaaggtctgtttctttcccaatgtagggtataggatggcacagggaagagggctagaaacctgacttgagctccccgcccagggctgaactctccagcatcctgatcacttctcattgaaccttgcttatactccccgtgtgatcggtagctctttatctcaaaacagaatattctaagccaacccctgcctgctctcaccaagtaagatttctcatttgaaccccagctcccagatacttaaaggccttctgtagaccatgtcctcaaggtcccctggccatctgcttgcatgttccagtttctctcctcccccatgcacatcgtgaaatgtgccctcccactccccaggatgagcaaggtggtgtcctctgtgactgagcagtcagcaacttaacaccaaaggtcaccaatgatcaaatccatgagagttgatccgaggagttatgtattagggctacgaaagagtaaacactcagtaaataatggctattattattatcatcatcatcatgattaccctcaagttcccccgggagagttcctattcaaccttcaaaaccccacattgttgcacccatcctacagagattgagctcaaattcagacagttgagattttgcgatgatttgatgagttccccaactggggtccgtccgtagagcagctgggccaaccctgaggtctctcagcatccagctctgttctttttctgcctgaccagttcctgggtataagtctcaggcccggccagtccggctgaggagtgtgcagacacaggcagtgccaatttgaatccatcgccagtccacacggccctgggcatcagtggtcaatgcccgcccataggactgcttggccttgcactcagacacccagtgccccccggtccacaccccggcggcaggtcctccacctacccccgggccaccttccttagatttatcggcctcgaagcgggtaacaaagaagtgctggcggagggaactgctgccagctgcaggcacctcacccaacacctccacctcgagcacacccaagtccacagcagtccaggggtctgtcacccagacagtgactgcatcgcacacggccagctcaccctgatgactcaccggtgaagtatcgctcaccccacgctggctgcggttggcccgggcgcctgctgactcccgaaaggctccagtctccagcaggaagaccagagggggcccggcagcggcacccctagacaggaccactcgggggaaaagaaggtcccactctggaggaggaaaacgcgacaatgtcgaggatggggttaggactccaatgacacactggggaggaggaaaatgagggggatgcggagggagcctgggggagcaggagcatctctcagagcatctctcagagcacatggagacagggaaaaggaggctgggattagggaagaagataaacacttcagtggggtcagaagttgggaaccccaggggaggcctgcctgccaggattatggggaagcccttgctctagaagtttgggggactccatataaaggacttgcatcacacccaacttgtagattaataataaatattcaacaactacaggtcaggcactatggctcacacctgtagtcccagcactttgggaggctgaggcgggtgtttgacttgaggtcaggagtttgagagcagcctggccaacactgtgaaacaacatctctactgataataccaaaattagctgggcgtggtgctgcgctccagtaatcccaccactttgggaggcc[133 bp omitted]tgaggcaggagaatggagtgaacctaggagggggagcttgcagtgagcagagatcacgccactgcactccagcctccacgacagagcgagactccatctcaaaaaaaaaaaaaagaaagaaagaaagaaaaagaaaacagggtggagatggaggatgacctccagctcaggaggtgtccatggtctggccttctgtgggggaaggaaggccacatgatcggtgtggcccaggtggcagggcctcagccttctaagccgagctccctcttcctccctctgacgttggcactggcagtgcaggtggggcggggtggggggcgcggcttggggacctgaatgggatgaatgggccgagggggatgtcatctcttccatcctccttcatccactgcctctcccttcccctcctcccccctcccctccgtccatctgcctcccatcccagctaggacctgggtagaaaaggggcctctggaaaggggacggggccttgactcttgggtaccctgcacttgaagaggaactctgggaaggggttgttcagagatttggccccttccccatctggctgtataaccttcctgtgcttttcttctgctagccggttacccctccctctcctgagatgtcaggaaagagggggccacctgcgtcctccacagtggtccccgaagcctggggttcccagccccagagctccgaggtggagggggtgctacagctctggtgaccactggttgtttcccagtcttctccacgccaacctttcccagaaccacaggcttccagaatgttgtagggaaactgcaaaatccgcgcctccaccagcctctcccagcgccaggtcaatttcacacacagggaaactgaagcctgcctcagaggggcagcgttttacctccttagtggcagttttgaggtgaatcggggtctccctaggattccaggttgtgcactttctctaaattgtggaatgtggccaggcgtggtggcttgagtctgtagtcccagctactcaggagccacagcaggaggatggcttgagcccaggagttcaagtgcagtggggaaacatagggagacctcgtcttaaagcaatttgtttggggccaggcgtggtttctcaggcctataatcccagcactctgggaggccagggcaggagtatcactggaggttgggagtttgagaccagtctggccaatgttgtgaaactgcatctctactaaaaatacaaaaattagcagggcacggtggcaggcgcttgtaattccagttactcagaaggctgaggcaggagagtcacttgaacccaggaggcaggcgctacagtgcgccgggattgtgccactctactccagcctggccagacagagtgaggctct[132 bp omitted]aaaccccgtctctactaaaaaatacaagaaattagccaggcatggtggcgggcgcctgtagtcccagctactcgggaggctgaggcaggagagtggtgtgaacctgggaggcggagcttgcagtgagccgagattgagccactgcagtccagcctgggtgacaagtgagactccccctgaaaaaaaaaaaaattgattggaacatcctccaggatgcaagactctcggttccttagagttctacaggaaggatggcagagtgcagtcgcccagaggtgaagtcccatctctgccatttgttggctgtgtgaccgggcacaaatcattactttctctgatcctgtattttaccatctgttgctattgagtaatagtagttgactattatgtatttttatttatttttatttttatttttatttttgtttgagacagagtctggccctgtcacccaggctggagtgcagtggtgcgctcttggctcactgcatctctgcttccggggttcaagcgattctcctgcctcagcctcctgagtagctgggagtacaggtgcccaccaccacacccagctaatttttgtattttttttagtagagacagggattcaccatgttggccaggctggtctcaaagtcctgacctcaagtcatccacccgcctcagcctcccaaagtgctgggattacaggtgtgggccataatgcctgacctgtagttgttgaatatttactattaatctacaagttgggtgttatgcaagtcctatatatggagtcccccaaacttctagagcaagggcttccccataatcctggcaggcaggcctcccctggggttcccaacttctgaccccactgaagtgtttatcctcttctctaatcccagcctccttttccctgtctccatgtgctctgagaggtgctctgagagatgctcccgctcccccagactccctctacatccccctcattttcttcctctccagtgtgtcaatggggtcctaaccccaccctcgacattgtcgccttttcctgatccaaagtgggaccttcttttcccctgagtggtcctgcctaggggtgccgctgccgggccccctctggtcttcctgctggagactggggcctttcgggagtcagcaggcgcccgggccaaccgcagccagcgaggggtgagcaatacttcactggcgagtcatcagggtgaggctggccgtgtgtgatgcagtcactggctgggtgacagacccccggaccgctgtggactcaggtgtgctggaggtggaggtgttgggcgaggtgcctgcagctggcggcagttccctctgccaacacttctttgtcacctgcttcgaggccaataactctgaagaaggtggcccaggggtaggtggaggggctgccgcagggtgtggaccggggggcactgggtgtctgagtgcaaggccaagcagtcctatgtgcgggcattgaccgctgatgcccagggctgtgtggactggtgatggattcaaattggcactgcctgtgtctgcacactcctcagccggactggccgggcctgagacttatacccaggaactggtcaggcagaaaaagaacagagctggatgctgagagacctcagggttggcccagctgctctacggaccccagtttgggaactcatcaaatcatcacaaaatcacaactctctgaatttgagctcaatctctgcaggatgggtgccaccacatggggttttgaaggttgaataggagttctcctgggggaacttgaggataatcatgatgatgatgataataataataggcactatttactgagtgtttactctttcttagccataatacataactcctcggatcaactctcatggatttgatcattggtgacctttggtgttaagttgctgactgctcagtcacagaggacaccaccttcctcatcctggggagtgggagggcacatttcacgatgtgcatgggggaggagagaaactggaacatgcaagcagatggccaggggaccttgagaacatggtctacagaaggcctttcagtatctgggagctggggttcaaatgagaaatcttacttggtgagagtgggcaggggtcggcttagaatattttgttttgagataatgagctaccgatcacagggggagtttaagcaaggttcaatgagaagcgatcaagatgctgcacagttcagccctgggtggggagctcaagtcaggtttctagccctcttccctgtgccaacctataccctacattgggaaagaaacagaccttaaaattgtccagcttgatggcatcgcggggaagggactaagtccagataatgtcctctgaggcttcggccccgtgggcaggacacacctcctgcgggcctattcaataatcagttaaatcacctgaagcacacgcatttccggggaccgctccgggcatcctggcttgagggtagagtgggcggaggttcctaagggagaggtggggctcgggctgaatccctcgttggggggcatctgggtcaagtggcttccctggcagcacagtcacggggaggccctctctcattgggcagaagctaagtccgaagccgcgcccctcctgggaggttggactgtggtgcaggaaagcctcaagtagaggagggttgaggcttcaatccagcactttgctcgggtcacggcctcctcctggctcccaggaccccaccataggcagaggcaggccttcctacaccctactccctgtgcctccaggctcgactagtccctagcactcgacgactgagtctctgagatcacttcaccgtggtctccgcctcacccttggcgctggaccagtgagaggagagggctggggcgctccgctgagccactcctgcgcccccctggccttgtctacctcttgccccccgaagggttagtgtcgagctcaccccagcatcctacaacctcctggtggccttgccgcccccacaaccccgaggtataaagccaggtacacgaggcaggggacgcaccaaggatggagatgttccaggtaagactgcagggcccctgggcaccttccacctccttccaggcaatcactggcatgagaaggggcagaccagtgtgagctgtggaaggaggcctctttctggaggagcgtgacccccagtaagcttcaggtggggcagttcctaagggtggggatctgaaattttggggcatctcaggtcctctgggctgtggggtgggctctgaaaggcaggtgtccgggtggtgggtcctgaataggagatgccgggaagggtctctgggtctttgtgggtggtgtaccacgcgggatgggaaggccaggactcggggctgcggtctcagacccgggtgaagcagtgtccttgtcccaggggctgctgctgttgctgctgctgagcatgggcgggacatgggcatccaaggagccgcttcggccacggtgccgccccatcaatgccaccctggctgtggagaaggagggctgccccgtgtgcatcaccgtcaacaccaccatctgtgccggctactgccccaccatggtgagctgcccggggcccgggcaggtgctgccacctcagggccagacccacagaggcagcgggggaggaagggtggtctgcctctctggtcaggggctgcggaatggggtgtgggagggcaggaacagagggcttcccggacccctgagtctgagacctgtgggggcaactggggagctcagctgaggcgctggccccaggcacatgctcattcccccactcacacggcttccagacccgcgtgctgcagggggtcctgccggccctgcctcaggtggtgtgcaactaccgcgatgtgcgcttcgagtccatccggctccctggctgcccgcgcggcgtgaaccccgtggtctcctacgccgtggctctcagctgtcaatgtgcactctgccgccgcagcaccactgactgcgggggtcccaaggaccaccccttgacctgtgatgacccccgcttccaggactcctcttcctcaaaggcccctccccccagccttccaagtccatcccgactcccggggccctcggacaccccgatcctcccacaataaaggcttctcaatccgcactctggaggtgtctttctgtgggctcagggcaatcacacacacacaggatgggtccagcttccaaaccattttatacagagtcacagtacagaactctggtagaaaacagggtggacggctaggcgcggtggctcacgcctgtaattgtcggaggctgtggtgggtggatcagctgaggtgaggggttccagaccagcctgaccaacatggagaaaccccatctctactaaaaatagaaaacatcgtcgagcgtggtggtgcatgcctatactcccaggtacttgggaggctaaggcaggagaatctcttgatcctaggaggcggaggttgcagtgagccaagatcccgccattgcacttcagcctgggcaacaaaaacaaagctccatctcaaaaagtaataataataataataataaaataaaaattaaaaacgttcgtccaggcgcagtggctcatgcctgcaatcccagcactttgggaggctgaggcgggtgcatcacctgagttcaggactttgagaccagcctggccaacatggtgaaaccctgtctctactaaaaaaaaaaaaaaattagctgggtgtggtggtgcgcgcctgtagttccagctactcaggaagctgaggaaggagaatgacttgaaccccggaagcataggtgcagtgagctgagatcacgccactgcactccagcctgggtgacagggtgagactccgtctcaaaaaaaataaataaataaaataaaataaaaataaaaatagaaaatagtccactactattactcaatagcaacagatggtaaaatacaggctcagagaaattaatgatttgtgcctggtcacacagccaacaaatggcagagatgggacttcaactctgggcaactgcactctgccatccttcctgtagaactctgaggaactgagagtcttgcatcttggaggatgttccaatcaatttttttttttttgagacggagtctcgctctgttgttgagactggactgcagtggcgcgatctcggctcactgcaagatccgcctcccaggttcctgccattctcctgcctcggcctcccaagtagctgggactacaggcgcccaccaggacgcctcgctaatttgttgtattttttagtagagacggggtttccccgtgttagccaggatagtcttgatctcctgactttgtgatccgcccgtctcggcttcccaaagtgctgggattacaggcatgaaccactgcgccaggcccaattttgtttgttttgttttgttttgttgtttttggaaagggtggcatggagaagactgggaaacaaccagtggtcaccagagctgtagcacctccttcacctctgagctctgctgggaaccccaggcttcgggggccactgtggaggacacaggtggccccctctttcctgacatcgcaggagagggagcagcaaccggttaggggaagaaaagcacaggaaggttatacagccaggtggggaagaggccaactccctgaaaaaaccccttcccagagttcctcttcaagcgcagggtacccaagagtcaaggccccgccccctttccagaggccccttttctacttaggtgatggctcctggctgggatgggaggtagatggaccgggggtgggaggggtggaggaggggaagggagaggcagtggatgaaggagaatggaagagatgacatcccccttggcccattcatcccattcagatccccaagcccccacctggactgccagtgccaacctcagagggtggaagagggagctcggcttagaatgctgaggccctgctccctgggccacaccaatcgtgtggccttccttctccccacggaaggccagaccatggacacctcctgagctggatgtcatcccccatctccaccctcttttctttttctttctttctttcttttttttttttttttgagatggagtctcgctctgtcgtgcaggctggagtgcagtggcgcgatctctgctcactgcaacctcccgctcccaggttcactgcattctcctgcaagcgcccaccac[131 bp omitted]caccacgcccagccgtccaccctgttttctaccagagttctgtactgtgactctgtataaaatggtttggaagctggacccatcctgtgtgtgtgtggttgccctgagcccacagaaagacacctccagagtgcggattgagaagcctttattgtgggaggatcggggtgtccgagggccccgggagtcgggatggacttggaaggctggggggaggggcctttgaggaagaggagtcctggaagcgggggtcatcacaggtcaaggggtggtccttgggacccccgcagtcagtggtgctgcggcggcagagtgcacattgacagctgagagccacggcgtaggagaccacggggttcacgccgcgcgggcagccagggagccggatggactcgaagcgcacatcgcggtagttgcacaccacctgaggcagggccggcaggaccccctgcagcacgcgggtctggaagccgtgtgagtgggagaatgagcatgtgcctggggccagcgcctcagctgagctccccagctgcccccacaggtctcagactcaggggtccgggaagccctctgttcctgccctcccacaccccattccgcagcccctgaccagagaggcagaccacccttcctcccccgctgcctctgtgggtctggccctgaggtggcagcacctgccccggccccgggcagctcaccatggtggggcagtagccggcacagatggtggtgttgacggtgatgcacacggggcagccctccttctccacagccagggtggcattgatggggcggcaccgtggccgaagcggctccttggatgcccatgtcccgcccatgctcagcagcagcaacagcagcagcccctgggacaaggacactgcttcacccgggtctgagaccgcagccccgagtcctggccttcccatcccacgtggtacaccacccacaaagacccagagacccttcccggcatctcctattcaggacccaccacccggacacctgcctttcagagcccaccccacagcccagaggacctgagataccccaacatttcagatccccaccttcaggaaatgccccacctgaagcttactgggggtcacgctcctccagaaagaggcctccttccacagctcacactggtctgccccttctcatgccagtgattgcctggaaggaggtggaaggtgcccaggggccctgcagtcttacctggaacatctccatccttggtgtgtcccctgcctcgtgtacctggctttaaacctcggggttgtgggggcggcaaggccaccaggaggttgtaggatgctggagtgagctcgacactaacccttcggggggcaagaggtagacaaggccaggggggcgcaggagtggctcagcggagcgccccagccctctcctctcactggtccagcgccaagggtgaggcggagaccacggtgaagtgacctcagagactcagtcgtcgagtgctagggactagtcgagcctggaggcacagggagtagggtgtaggaaggcctgcctctgcctatggtggggtcctgggagccaggaggaggccgtgacccgagaaaggtgctggactgaagcctcaaccctcctctacttgaggctttcctgcaccacagtccaacctcccaggaggggcgcggcttcggacttagcttctgcccaatgagagagggtctccccgtgactgtgctgccagggaagccacttgaccctggtgcccccaaggagggattcagcccgagccccacctctcccttagggacctccgcccactctaccctcaagccaggatgcccggagctgtccccggaaatgcgtgtgcttcaggtgatttaactgattattgaataggcccgcaggaggtatgtcctgcccacggggccgaagcctcggaggacattatctggacttagtcccttccccgcgatgccatcaagctggacaattttaaggtctgtttctttcccaatgtagggtataggttggcacagcaaagagggctagaaacctgacttgcgctccccacccagggctgaactgtgcagcatcttgatcgcttctcattgaaccttgcttatactccccctgtgatcggtagctcattatctcaaaacagaatattctaagccaacccctgcctgctctcaccaagtaagatttctcatttgaaccccagctcccagatacttaaaggccttctgtagaccatgtcctcaaggtcccctggccatctgcttgcatgctccagtttctctccacccccatccacatcgtgaaatgtgccctcccactccccaggatgagcaaggtggtgtcctctgtgactgagcagtcagcaacttaacaccaaaggtcaccaatgatcaaatccatgagagttgatctgaggagttatgtattagggctacgaaagagtaaacactcagtaaatagtggctattattatcatcatcatcatcatgattactctcaatttccccctggagaactcctattcaaccttcaaaaccccacgtggtggcacccatcctgcagagactgagctcaaattcagagagttgtgattttgtgatgatttgatgagttcccaaactggggtccgtagagcagctgggccaaccctgaggtctctcagcatccagctctgttctttttctgcctgaccagttcctgggtataagtctcaggcccggccagtccggctgaggagtgtgcagacacaggcagtgccaatttgaatccatcgccagtccacacggccctgggcatcagcggtcaatgcccgcacataggactgcttggccttgcactcagacacccagtgccccccggtccacaccctggcggcagccccctccacctaccccacggctaccttcctcagagttatcggcctcgaagcggtgacaaagaagtgctggcagagggaactgccgccagctgcaggcacctcgcccaacacctccacctcgagcacacccaagtccacagcggtcccgggatctgtcacccagacactgactgcatcacacacggccagcctcaccctgatgactcgccggtgaagcatcgctcgcctcacgctggctgcggttggcccgggcgcctgctgactcccaaaaggccccagtctgcagcaggaagaccagagggggcccggcagcggcacccctagacaggaccactcaggggaaaagaaggtcctactttggatcaggaaaaggtgacagtgccgagggtggggttaggaccccattgacacactggggaggaagaaaatgagggggatgcagagggagcctgggggagcgggagcatctctcagagcacctctcagcacacggagacagggaaaaggaggctgggattagagaagaggataaacacttcagtggggtcagaagttggaaaccccaggggaggcctgcctgccaggattatggggaagcccttgctctagaagtttgggggactccatataaaggacttgcatcacacccaacttgtagattaataataaatattcaacaactacaggtcaggcactatggctcacacctgtagtcccagcactttgggaggctgaggcgggtggatgacttgaggtcaggagttcgagagcagcctggccaacactgtgaaacaacatctctactgataataccaaaattagccaggcctggtgctgcacgcctgtgatctcagctactcgggaggctgaggcaggagaatcgcttgaacccgggagggctgagattgcagtgagccaagatcgtgtcactgcacttcggcctggacaacacagtgagactctctctcaaaaaaaataaataaataaggccgggcatggtggctcacacttgtaatcccagcattgtcggaggctgcagtgggtggatcagctgaggtgaggagttccagaccagcctgaccaacatagagaaaccgcacctctactaaaaatacaaaatatcctccggcgtggtgctgcatgcttataatcccagccacttgggaggctgaggcaggagaatcgcttaatcccaggaggcggagtttgaagtgagccaagatcgcgccattgcacttcagcttgggcaacaaaaacaaagctccatcttaaaaaaataataataataatcataaaataaagataaaaattgttcggccggggacagtggctcttgcctgcaatcccagcactatgggacgccgaggcgggtgcgtcacctgaggtcaggactttgggactagcctggccaacgtggcgaaacgctgtgtctactaaaaaaattacaaaaattagctgggtgtggtggtgcacacctgtagtcccagctactcgggagtctgaggcaggtgaattgcttgaacccgggaagcataggtgcagtgagccaagagcgcgccactgcactccagactgggtgacagggcgagactccgtctcaaaaaaaaaaaaaaaaaaaaagatgaaataaaaataaaaatagaaaatagccaactacaattactcaatagcaacagagggtaaaatacaggctcagagaaattaatgctttttgcctggtcacataggcagcaaatgacagagatgggacttcacctctgggcaactgcattctgccatccttcccgtagaactctgaggaaccgagagtcttgcatcttggaggatgttccaaccaattttttttttttttttttg[131 bp omitted]ccaccacgtctggctaatttattgtattttttagtagagacggggtttccccgtgttagccaggatggtcttgatctgctgaccttgtgatctgcccacctcggcctcccaaagtgctgggataacaggcatgagccactgcgcccggcccaatttttttttgtttgttttgttttgttgtttttttttttttttttgaaacagagtctcactctgtctggccaggctggagtacagtggcacaatcccggctcactgtaacgcctgtctcctggtttcaagcgattctcctgcctcagccttctgagtaactggaattaaaagcacctgccaccgtgcccagctaatttttgtatttttagtagagatgcggtttcacgacattggccagactgttctcaaactcccaacctccagtgatactcctgccctggcctcccagagtgctgggattataggcctgagacaccacgcctggccccaaacaaattgctttaagacgaggtctccctatgtttccccactgcacttgaactcctgggctcaagccatcctcctgctgtggctcctgagtagctgggactacagactcaagccaccatgcctggccacattccacaatttagagaaagtccacaacctggaatcctagggagaccctgattcacctcaaaactgccactaaggaggtaaaacgctgcccctctgaggcaggcttcagtttccctgtgtgtgaaattgacctggcgctgggagaggctggtggaggcgcggattttgcagtttccctacaacattctggaagcctgtggttctgggaaaggttggcgtggagaagactgggaaacaaccagtggtcaccagagctgtagcaactcttccacctcggagctctggggctgggaaccccaggcttcggggaccactgtggaggacgcaggtggccccctctttcctgacatctcaggagagggaggggtaaccggctaggggaagaaaagcacaggaaggttatacagccagatggggaaggggccaaatccctgaacaaccccctcccagagttcctcttcaagtgcagggtacccaagagtcaaggccccgccccctttccagaggccccttttctacttaggtgatggctcctggctgggatgggaggcagatggacggaggggaggggggaggaggggaagggagaggcagtggatgaaggagaatggaagagatgacatccccctcggccccttcatcccattcaagtccccaagccgctccccccccacacctgcactgccagtgccaacgtcagagggaggaagacggagctcggcttaggaggctgaggccctgccccctgggccacaccaatcatgtggccttccttctccccacagaaggccagaccatggacacctcctgagctggatgtcgtcccccatcttcactctcttttctttttctttctttccttctttctttctttctttttttttttttttgagatggagtctcgctccgtcatgcaggctggagtgcagtggtgtgatctcggctcactgcaagctccccctcccaggttcactccattctcctgccacagcctcccaagtagcttggactgcaagcgcccaccac[131 bp omitted]caccgcgccccgccgtccaccctgttttctaccagagttctgatactgtgactttgtataaaatggtttggaagctggacccaccctgtgtgtgtgtggttgccctgagcccacagaaagacaccgccagagtgcggattgagaagcctttattgtgggaggatcggggtgtctgagggccccgggagtcgggatggacttggaaggctggggggaggggcctttgaggaagaggaggcctggaagcgggggtcatcacaggtcaaggggtggtccttgggacccccgcagtcagtggtgctgcggcggcagagtgcacattgacagctgagagccacggcgtaggagaccacggggttcacgccgcgcgggcagccagggagccggatggactcgaagcgcacatcgcggtagttgcacaccacctgaggcagggccggcaggaccccctgcagcacgcgggtctggaagccgtgtgagtgggagaatgagcatgtgcctggggccagcgcctcagctgagctccccagctgcccccacaggtctcagactcaggggtccaggaagccctctgttcctgccctcccacaccccattccgcagcccctgaccagagaggcagaccacccttcctcccccgctgcctctgtgggtctggccctgaggtggcagcacctgcccgggccccgggcagctcaccatggtggggcagtagccggcacagatggtggtgttgacggtgatgcacacggggcagccctccttctccacagccagggtggcattgatggggcggcaccgtggccgaagcatctccctggatgcccatgtcccgcccatgctcagcagcagcaacagcagcagcccctgggacaaggacactgcttcacccgggcctgagaccacagccctgagccctggccttcccatcccccagggtacaccacccacaaagacccagagacccttcccggcatctcctattcaggacccaccacccggacacctgcctttcagagcccaccccacagcccgagggacctgagatgccccaacatttcagatccccaccctcaggaactgccccacgtgaagcttattgggggtcacgctcctccagaaagaggcgtccttccacagctcacactggtctgccccttctcatgccagtgatggcctggaaggaggtggaaggtgcccaggggccctgcagtcttacctggaacatctccatccttggtgcgtcccctgcctggtgtacctggctttatacctcgggtttgtgggggcgtcaaggccaccaggaggttgtaggatgctggagtgagctggacactaacccttcggggggcgagaagtagacaaggccagggaggcacaggagtggctcagcggagcaccccagtcctctcccctcagtggtctagcgccaaggatgaggcggagaccacggtgaagtgacctctgagactcagtcgtcgagtgctagggactagtcgaggctggaggcacagagagtagggtgtaggaaggcctgcctctgcctatggtggggtcttgggaaccaggaggaggccgtgacccgagaaaggtgctggactgaagcctcaaccctcctctacttgagccattcctgcaccacagtccaacctaacaggaggggcgcggcttcggacttagcttctgcccagtgagagagggtctccccgtgactgtgctgccagggaagccacttgacccagatgccccccaacgagggattcagcccgagccccacctctcccttaggaacctccgcccaccctaccctcaagccaggatgcccggagcggtccccggaaatgcgtgtgcttcaggtgatttaactgattattgaataggcccgcaggaggtgtgtcctgcccgcggggccgcagcctcggaggacattgtctggacttagtcccttccccgcgatccagccgcagctgagtgggcgtgtctgggctagtcctgtccccacactgcggatagacttaatgagtgcgagcccacctaggtccgacaccgcgtagtgagcggctgcccagagctctgctccgcccccacgccagggggcgtgtctggggtggggctggcccggcaggctcccactagccccggcttacagcggcctgagcgggagttctcggtgctgtaggctttcgggacgctgtgtatgcccggcaggggcttccagtgggggccaccccaagtcgcctccagcgggcggaagcggtcgagccggcggagcgggtgcggcgaggagctgtaggtttcctgagccggagacatggcccgccgtgcggcgctcgaggcggcctggaagagcagagacagggctgccgctgcgggtcgtgactccagagttggggcgtctcttctaagctccagtaggtcaggtagtccttgcgggggtatccggacggctccgtcctgtgggagcagggcgggatggtgaggatacagctggatccttggggacgagtttcagacctcgggatctaaggagtctgcacattcaaactcctgcatttccaggcgagcaccccttaggaaggacgcgaccgggcacgcgttgcctgcgttcctgggtcctcgaggtacttaacgtcctggaagctgagctttcgcatcctagggaaggaaacgggggctttcgcttccttgcgaaggagcatgtgggggctcaagtaccgaaggaggccctgccctcagatccagaatcccctcgagccgctgtgcaggcttcctgtccctaccgcggttcctggaggtgacactaaggactcctgggtgctaaaagagggaggggctggggtctgaactgtggttgttgctgctataggagtcgagactgagaccaccggtcagggaatgggagccagcccaggggctcggcgtgcaccggccatggcgggggctgtgcaggaggcggtgccgagcgagagcccggcttacttgggatagaaccgaaagtcccgcgccgaggtggtcagatagagctggcggcggttcaggacgccccggtcggatactgtgaagggtgggccagacagcgcggggttcttcgtgcaggcgattagagcctgagcaagattgggggaggaggcatacccaagacatagatttcataccccatcccaagtcctgggtcccgagttcagaatccctctccttcggcctcgacagccatgacggccacggccctcacaccccgccccagggtcagagcccttcctgccacccacgccagggaacttcagcttcctttctcatacccgaacccttcccagcctcacctccctaaatccaagccctcctgctggtcaaggaactcaaatgcaggcccccagccaccacaaaatccccctggttctgcccccggtctcaagccttcttggtgtggccactggagctgagctgcatcttgggcaacaactccaggttacctctcctaactcccaccctaccacgtctcagaatattctagtctcctccccacccacagcccgccgtctagctccgcagcagcttaggagccctgaaggcgagtttccagcccctggtccttctggcctggcgtggatgcccagcccttcctcccgctcctctaacctcccgatcccgccccagatcctttagccacgccccaaagctgtgatttccttctggccccgccccaggctcccggagctccgctggtctcgccagcgccggcttccacccagacacctgggaaggccccccgcggtggtggtccgagagttgtgaggggctggggcccgacgtatttgggggcgcgcgcgtccgggccgggagagcaagtgtactgcgccctcgtctcgctgctctggtactttgtggtcagtaggagggttcagctgcggtgtctgagctgcggaaaggcaacccagagactcatgtgaaggagcaggggactcaaatgcagtcccccgcagactccggcgctccccaaatcttaccttttctcctgaatccttgatccccacagtccgcgtggggtctgcaggctctggggctctgggctgggcgcagggcccgccatgggtcttgggcacgtaggccgagccagaggttgtctcccatctgctgaggacctcgtcgaaagcccagatgcgagaatcctgctttgcagtcggaggtagagggtccgcgaccgtggactggagagaaggcgccgcacatcagctagaaagactcaggagtccctatcaccccccaccccaaactctgacctcttccagtcggcccccagccctttcctctgcagtccctggcatccaaattccctggcgcctcctctctcagacccaggactccaggaccctcctccttcagagaggagtccaagctcccaatccccttttctcagcccccatctttctgggtccccaggccccgcagggcttcagcctagggtctgcccacctgcaccgtgggcggggggaagggtacgggtgggataatgccatgggtaacgtagctgctggtgagatgccagttgggccaggattcaggcatctcggttgcagagatgaaagaccacggggggccacagcgcacagccagggtgccactggccatggttccaccccctccctgtagccaagcaggagctggtttgttgctgttgccccaggtgacagaacccgcccaccccaatccagccaatgaaaggcctgcaggcacatggatggatggagtgattaagagacccagagacagagagacagggactccaagaggggcacagagaaacacggagtgggggatggagagtcagaaagaggcggacagaaggggatggagaagttcaggatttcagagacccagggggtgggggagacagagacacagaaagaaggacagagacctgggggtgtcagagatacagacagagacccctgcactgcccccagcacctcaggacatccatgagaaacacccccctttgctccagggtccagaacctcctggctgcttcctccctctgccaggcctgcccacctcggggtaacgatttccagatgtccccggggctccccaacccttcccgcacgtgctgaaggagtcagcgctggtgtcagctgtcctgcctgcctttgatttggttgaaaacttccacctgggtaggctgggtggggaaagagaaagggatctagagagaagtgcaccggaccatagcgaaaaagatgggctttgatgagtgaggaataaatacaacaagaaaggggagagacagggaggaagaaagagaccacgatggaaagggagctattagtactacccagaggcgacagacactggaagttagagacagagatgaaggtggcaaaaacgaccaaagtcacagatggaaaacaaggagacgtagaaactgaggcagccacgccccaccctgcccaggggcctggtctgtatagatgcggggagaagttgcctatgtcctttgctcaaagctggacctgagagagagagagagagttggtggggcgatgggtaacatgtgaagggctattgtgaaggcctgtggtctgtccctggcttcccttgtcacttcttcactataaacagcttttgatcaccgggcgcagtggctcatgcccgtaatcccagcactttgggaggccgaggcatgcggatcacttgaggtcaggagtttgagaccagcccggccaacatggcgaaaccctgtctctaccaaaaaatacaaaaagtagccgggcgtggtggcgcacacctgtaatcccaactaaggcagaagaatcacttcaacccgggaggtgaaggctgcagtgagctcagatcacaccactgcactccagcctgggtgacagagcgagactccatctcaaaaaaaaaaaaaaaaaaaaaaaaaaaaaaaaagcttttggtcaaggcctctgactgctcaacccccattatctcatcctaccagcccattctgcagacaaggaaaactgaggctactttctgcagccatgcccaggatcccacttacccctcctcccccattcaggcttctggggcctttctgttggattttgctggccctactcaacagctctcaatggacagtgaccccctgatcctagccagggggccgatgagttagtcagaaactcatgccccactcaagctggacaaaatttttttcttttttttgaaatggagtttcgctctttttgccaaggctggagtgcaatggtacagtcttggcttactgcaacctctgcctcctgagttcaagcaattctcctacctcacccttcagagtagcttggattacaggcatccgccaccacgaccagctaatttctttatataattttagtagagtcgggttttca[131 bp omitted]ctttcccaatgtagagtaaaggttgggacagggaagagggctagaaacctgacttcagctccctgccgagggctgaactctccagcatcctgatcacttctcattcaaccttgcttgtactcctctgtgatcggtagcttattacctcaaaacagaatattctaagtcaacctttgccccctcttaccaagtaagatttcccatttgaaccccatctcccagatacttaaaggccttctgtgggccacgttctcaaggtcccctggccatctgcttgcctgttctagtttctctcctcctccacccacatcgtgaaatgtcccctcccactccccagcaaggtggtgtcctctgagactgagtagtcagcaacttaacaccaagggccaccaatgatcaaatccatgagagttgatctgaggagttatgtattagggataagaaacagtaaacactcagtaaatagtggctattattattatatcatcatcattattaccctcaagttgctccaggagaactcctattcaacctccaaaaccccatgtggtttcacccatcctgcagagattgagctcaaaatcagagaattgtgattttgtgattatttgatgagttcccaaactggggtccttagatcagctgggccatccctgaggtctctcagcatccagctctgttattttcctgggcatgggtctcaggcccggccagtccggctgaggagtgtgcagacgcaggcagtgtcaattcgaatccatcgccagcccacacggccctgggcatcagcggtcaatgcccgcacataggactgcttggccttgcactcagatacccagtgcctcctgtccactccccggcagccccctccacctgcccccgggccaccttcctcagcgttatcagccttgcagcgggtttcaaagaagtactggcggaggggactgccgccagctgcaggcacctcgcccaacacctccacctcgcgcccacgcaagtccacagcggtccggcggtctgtcacccagccactgactgcatcgcacacagccagctcaccccgacgactcgctggtgcagtttcgctcaccccacgccggctgcggttggccggggcacctgctgactcccgaaaggccccagcctccagcaggaagagcagagggggcccagcaggggcacccctagacaggactactcggggggagagaaggtcccactcaggggccagaaaagggggcaatgttgagggtgggggttgggactcaattggcacactggggaggaggaaaaggaggaggatggggagggagcatgaggggagagggagcatctctcggagcacctggagacagaaagagggaggctgggattagagaagggggtaaaaacttcagtggggaaagaagttgggaaccccaggggaggcttgcctgccaggattgtggggaagcccttgttctagaagtttgggggaccctatatctagggcttgcgtaatgcgcaacttgtagattaataataaatattcaactactacaggccaggcactgtgccccacacctctaatcccagcactctgggaggctgaggcaggtggatgacttgaggtcaggagttccagagcagcctggccaacatggtgaaacctcatctctaccaaaaataccaaaattaaccgggcatagtgctgcacgcctgtaatcccagctactcagtaggctgaggcaggagaatcacttgaacccaggaggccgaggttgcagtgagcagagagtgcaccactcccctgccacctgggcgacaagagtgagactctgtctcaaaagtaaaaataaggccaggcatggtggctcacacctgtaatcccggcactttgggaggccgagatgggcggctcacctgaggtgaggagttccagaccagcttggtcaacatggtgaaaccccttctctactaaaaatacagaattacccgggtgtggtggcgcatgtctgtaatcccagttacttgggaggctgaggcagggcaatcacttgaacccaggaggtggaggttgtggtgggctgagattgaaccattgcactccagcctgggcaacaagagcgaaactccgtcttaaaaaacaataataataataaaataaaaataaaaataattcaactactattacttaacagtaacagatgttgaaatacaggctcagagaagttaatgatttgtgcccggtcacacagccagcaaatggcagagatgggacttcacctctgggcaactgcactctgccgtccttcctgtgcaactctgaggaaccgacagtcttgcatcttggaggatgttccaaacaattttttttttttgagacagaatctcactctgttggccaggctggagtacagtggcacaatcctggctcactgcaatgtctgcctcctgggttcaagtgattctcctgcctcagccttctgagtaggtgggattacaagcacctgccactgtgcccagctaatttttgtatttttaatagagatggggtttcaccatgttggccagactggtcttgaactcccaacctcaagcaatagtcgtgtcctggcctcccaaagtgctgggattacaagcataagccaccatgcctggtcccaaacaaaatttttttttttttttttttgagatggaatctccctctgtcgcccaggctggagtgcagtggcacgatcttggctcactgcaagctccgcctcccaagttcatggcattctcctgcctcagcctcctgagtagctgggactacagactcaagccaccacgcctggccacattccacaatttagagaaaggtcacaacctggaatcctagggagaccccagttcacctcaaaactgccactaaggaggtaaaacgctgcccctctgaggcaggcttcagtttccctgtgtgtgaaattgacctggcgctgggagaggctggtggaggcgcggattttgcagtttccctacaacattctggaagcctgtggttctgggaaagggtggcgtggagaagactgggaaacagtcagtagttaccagacctgtcagcacctcctccgcctcggagctctggggctgggagtccccaggcttcggggggcccctgtggaggacacaggtggccccctccttcctgacatctcaggagagggagggggcaaccacctaggggaagaaaagaatagacaggttatagaggcaggtggggaaggggccaaatccctgaacaaccccttcccagagttcctcttcaagtgcagggtacccaagagtcaaggccccgccccctttccagaggccccttttctacccaggtgatggctcctggctgggatgggaagcagatggagggaggggaagggagaataggggaagggagaggcagtggatgaaggaggctggaagagattacatccccctcggcccattcatctcccagatggggcggaactggcctggacacccgggtccctgagggcccacactcaagaagccctggttccccaagctgcttcctggaatgttccctcctcacaggacaggccagggcccgcccaagacttctgcacatacctggagtggctgcctgccctggctcctcggtacaggaaaggggaagggtggagagtgaaaggagcccaggctgacccaaccaggaccgccttctccctcagaccgagtagtgcagaccccagggcctccaccttcagacccaggagttcagatccccagcgccctcctccctcagacccaggagtagtccaggcccccagcgccctcctctctcagacccagaagtccaggcccccagcacccttctccctcagacccaggaggagtccaggcccaggcccccagcacccttctccctcagaccctggagtccaggtccccagcgccctcctccttcagacccaggagtccatgcccccagcgcccttctccctcagacccaggaatccaggcccccagtgccctcctctctcagacccaggagttctggaattcaggcccctccttctcggatactaagaaatgcagactccgggttcctcatcctccagatttgggttgggggttccggactccgagacccctcaggggaaaccggctgcatatctgggacacttccctcttgcctcagtttcctccgccaagccccgccccggtcggccccgcccccgtccctccccacccgagggcagggcgaccaggacgccggaatcccgagggaggaggagtggagatcttacctggggcgccctcttcggctcccgcggctgccctccgcccggcagcagctcctcctcctgctcgctggctgcagggacgctcgctggcccgccgggtgctagctgctcacgctccgcagggcccgggtcgggggcgggggcggggcggcgccgggcggcagaggaggggccgggggatcctgccttgcactcgcgtgccgggaccttggaagccaggcctggctcgttcaacgcggccgccttggtcacaggagtcccagtttccagctgcctcctcctttggacctagcagtccaggcccccagcccctcctcccttcagacccaggagtccaggcatccggcccctcctccctcagacccaggacttgcgaccccagccacctctccccccagccccaggcgcctgagtactaagcccacagttccccccaccacctcccaaccccgccccgtctcagactcaggagtccagcccccagcctcctcctccattagccccaggagtctgggcctgagattcctttgccgtcttttgccaattgcgtgtcaatcccggggcagattcccaccctctgctctcctccccacttcccaggagctccacgccagacattaaccagctgggcttgggcagtgataaggccccaggcccggggagacagtggatgtgggggctcccgcatactcctctcccctggaatttcctggctggggaccggggagaaggtcttgtcctgagctcagataagagacgtgcaaggtatcataggaccagagatagacagatgtgtcttaagaacaatcagctaccttgagaaatggtgcgcggtgacatgaagggagagatagggagaagacatggaaaagtggggagagaccaaaagaaagagggggaccgagactagagagagtgggggagggcaggagcccagagagaagacagaggcccagagagcgtgagggcagacccccccacccccccgagaaggggacagagcccctgagagaccctgagaaagacagggatgggaccggagccggagtgtctcaggacagtcatgagggcagcggggctcctcaccccaccacacctctaccctgagactccgctcccctccgcctgcgctattttcagaaggaaaactgacacctgcctcgagggtcatcccacaccccctcagcctaaatatagcatggcaaggtggcaggagggtgtccccggttagggtgtttcctgctcctcaccatcccagccaaggcaacacacaaggccgctccagttatttattgggggtggggggaagggccacttcccaggctttgggtgtgcattcaggtcacctctccggcttctccacccttcccctgttcctaaacagccaatacatcctgccgcatagcaggaggactctagcttctagcttctagcttctagtcctggaggggatagtagggatgaggtttccaaacagagtgactgggaaacagtctctgtccccctatctccaggtctctgttcccctccctctggatttctgtctccctccaactctgggtctgtccttctctctctgagtctctgtccccctctctctctgggtctctgtccctctctctctgggtctctgtccccctctctctctgggtctctgtccccttctgtctgtgggtctctgtccctctctctctgggtctctgtccccctctctctctgggtctctgtccccttcactctctgggtctctgtctctctctctgtctctggatctctgtcccccctctctctgggtctctgttcccccccaggtctctgtccccccttctctctgggtctctgtccccctctttctaggtcccagttttcttctctctggatatctgtccaccctctctgggtcccagtctccttcttgctgagcctcttgcatcctctctcttggggtcactgtctgcttctctttcccctcgtgggggtctctgttcccgctcccggccatctgccctcttcccccttgcccttggatttctctcttttgctctgtgcctctcctccctcctggcctcagttcctgtctgtgtctcctctttaggtctctgtgctggagtccaacctgtctcttgtcactgtgaggtccgtctccattctgtccctaaatctggctttctctccatttcagagagaagtgactacctaaagcttctattaatttcaaccattatcaaactcctctcaccatctgtaccttctctttagctgtatgaaaaggtgctcagatgaaaccaggggtttccacactgaattcctgagctgcattttgagttgccaagaggaggcgtgttctcctccaaccagttcccttcccatgcttcccactggtgtctctaaggaagatttatttgacccaaaaaaggggtgggtatggctaaaaataacaacaacagtctgtaaaccactggataggttttaataaattaacccaagtaaagtactttgataccaaaggaagccctatatgtgttagtgatttcagccttcttcctctaaatgccctttgagttctgaaagatttctgaaaatgttcggccttgtgaccttgggtaacacctgctgctctgagcctcagtttccccgtctgtaagaaatgaggctacgggactcaggaggacccgtgtgtcccagcaggctgatggggacatgtgaagcagacagacagcctgcctggcccctggggacaagctgtgagaccttgggaagccactcccctgctctgagactcaggtttctcccctggaaaacagagtgaggcccccagcctgtctgacagccttcctgagctgcagggagggtaggtgacaggcctggttcaggattgttctgtgattctatggaatagactgtacatcactcttgggttcaggggcaccaactttttctggctttttcttttcttttctttttttttttgagacagagtgttgctctgctgcccaggctggagtgcagtggcgcaatctcggctcactgcaagctccgcctcccaggttcatgccattctcctgcctc[135 bp omitted]ggcctcccaaagtgctggggttacaggcatgagccaccgcgcccggccttttctgcctttttctattgtggttctctttccctgagactctgttgttctgtctccaactctgggtgtctgacgctgccctctgggtctctgtccctccctcccccactggctctttttgtttgtttgttgagacgggggctccctctgttgcccaggctggagtgcagtggtgcaatcatggctcaatgcagcctctacctctcagggtcaagggatctttctgcctcagcttcctgagtagctgggatcacaggcatgtgccaccacactcagctaatttttgtattttttgtagagatggggtctcaccatgttgcccaggctggtcttgaactcctggcctcaatcaatcccccttcctcggtctcccagagtgctgagattacaggcatgggccacttcgcccggcttctatcccctgctcttggtctctgtctccccactctggatttctgttcctctcttctgcgtctctgccataccccaccctccaggtcattgtctccctctccctgagtctctgtttctctccctttgggtctctgtctctctgggtttccacctcttcctttttctgggtctctttctctatccttttggctctgtccctctatcatgtctggacagagtacagttttctccccctctcccctttcccttgtggctctgacctccatgtctgagcataaaactgtaggggagaatgggagtgaacagcacaatgaagtggatgtggggtaaacaggaggagcatccacctcttcctaatttacccagtcgcctctggatgaacacccaatcccatggatacagaatccagtcccgccccctacagcgagctggggagccagctcggcacacctcccagagccctcgccactgcatgctcccagatacatgatgcttccccactgctatttcctttgggtcctggtgctaccactaaatgcaaaacagcccgatgtggccctatggaactcgttcgcacagtccaactcaacccaacttcctgtaggactcacatagtgacacaactcaatggaactcaattcagcatggccctatgagactcaaacagtggcatgacccaactgaactggccttacaaggctcatatggttgtacaattcaacacaactcaactcgctgtggccacgaaaaatgtccagccacacacctctacacagttaagcccaacagaaccctacaagattcatttggtcatacaaacttaacccaatgtgacctagaaagctcaaattctaccactggactcttcacatttctacatgactcgcaagttcacagaacctaaaataacatgcccctggaagaatcacagagctacacaatttccaccatgtctcaacgaaacttaacaccacacacattcgatctcaacaatgccatgggggaccatctaacttgacccaacatggccctaggggacccaccaaaccacagaatcctacacaatgcagctggaccacactatcccagactcacaacccaaccaaacccaacactgacctaggaaactcacaaaatgatacgaccaaacctatctcaacactaccccaaaaggctccatgagctttgcacaactcagagtaatatgaaccaattgagtcttcattaacacaacacaacccattgccattcgctgctgcttcaggaggtacccacaggagctaccaaaccacacaacccaagacccaacaagactcagtgtttccccactcgttacgacttaacctagctcttcctaaacccaatcccctccccccagccttgccctccaccctgccctccctccctccctctagggaggtgtgaggtcctgcagacctcaactgttcctcacacttcggtgaccaggtgtttccctgggggtgcccagagtggaggtggtagctcaggtacctccccgtccaccagccccccattggccttgccctccagtgggccacaaggctgcatgtccacatggctgaacatcccagcctcttcgccctctgtctcccggtgataaaagtagctgaaattggagacaatgacgggcactggcagggaaatagtcagcacgcccgcaatggcacacagagagcccactatcttgccacccacagtgacgggtgccatgtctccatagccaactgtagtcatggtgactaccgcccaccagaaggactcagggatgctagtgaaatgggagtccacccggtcaacttcggcaaagtagacggcgctggaaaagaggaccacaccgatgaagaggaaaaagatgaggaggcccagctcacgcatggaggcccgaagcgtctggcccaagatttgcaggccctttgagtgccgggacagcttgaagatgcggaagacacgcaccaatcggatgactctcaggatggccagtgacatggcctgctggcccacccctcgctgccgggccagctcggtgcccagtgccacaaagtagggaaggatagccacaaaatcgatgaggttcatcacgttcttgaagaagatagccttgcttggacagaccaggaggcgtaccagcagctcaaaggagaaccaacaaatacacagcgtctccaccacgaagaacgggtcattgaagggcaggcggggtggatttccaggcatttggctggagccattcagcggagcggggaactgcagggaggaaagtgttcagggagggtcaggctggggctaggacacggggacagccttaatcatcatttaaatacccagctcctctttacacattggtcagtagccgctgcgccaaggccctccgtgacctggttatcccagacttcctcccaggatcccagggatcatccctgggccgctgactttctggttgcctgacctggtgggtggctggagacgtggtccctgccccttcatgcgtgggaactcatgtttgagtagggtgcaacctcttctctctcaaagtcccgcctccagtgttgattttctagatggggagcatccctgccctggccccaccaccttgtgcctagcttttccttgccctccacagtcccagcccagagtataatgcggctgggcgcggtggctcacgtctgtaatcccagcactttgggaagccgaggcgggcggatcacgaggtcaggaaatagagaccatcctggccaacacggtgaaaccccatctctactaaaaatacaaaaattagccgggcgtggtggcctgcacctgtaatcccagctacttgggaggctaaggcaggagaatcgcttgaacccgggaggcagaccttgcagtgagccgagatagcgccattgcactccagcctgggcgacagagcaagactctgtctcacaggaaataaaaaaaaaaagaccttctctgcaagccgagccctaggccccctcctctggcccctcaacctggctttctttccatagattcctcctactgtcgcccctcgggctccagcaccctcagctggagttattcagggcctggctttcaccacccagccgcacagactccggagttttcaggctctccttggcccccctcagctgtgatttttaaggttcctgtcctcctaccccttgcatcaagggccctgccctcttcacgccgggtttctcactgacctcaaccccaccttctgatggggcaggtcctccgacccggatcctcaggccccgcctcccgcccaccctgtcttcggctggcccacccctcgcagcccctggccccgccttatgattggccaggtcccctctggaccccgcccatctcctcccaaaccccgcccgtctccacccacgccccgcctctcaccgggccggctgcggctgcagcagcaagccccgtgccgtcgcggtcgtcgcggaagtcaggcagcgtctcgaggcagaagacgacgatggagacgaggatgaccagcacggagactacggcgagcacgcgcgcggcctgagagctctcgggaaactcgaaaagcagccacagctggcgggcgaaggcgcggcggggcagggggcgctcgggcggcaccgggcagccctcgtcctcgcgcaggcgtgccagggccgccgcgcccagcccgtagaaggccacctcttccaggaagacgtcgagcggcacgtgcgccggccgccgcagccgcccaccggactggtagtagtagagcacggcgtcgaagctgggccggtgccggtcgaagaaatactcgcggcgcgcgtcgtcgtagaagcggccgcggcgcgctgggtcccctagcagagtgtccgggaagcggcccagcgtgcgcgcccgcgtctcgaagcgcagcccggccacgttgagcaccagccgctcgcagcagccgcacggcggcgggcaccgcggctccatggcgcgcgcagccccggcgacccgcgaaccgacgtgtggccccgacgcccggccccggtgcggccccgcctcggccgcctcggccgccgccgccgccgccccagcccggtgtccggtgtccggtgtccgcgcgtaaaaatagcccggcagggcggctagggcgcgagggagggggcactgtgaccccggcggggcggagggcgacagggcgaccgcgcgccctctgccgggacgcccgccctgccctgccccgccgccgccgccgcccgcgcctgctctgcgcctttcccgtcccggggtcccctttctctccgtccttctgccgccgggatcctgtcctgcgtctctccaagtttccgtgtgcgtgtgtttcgtcagaatcaggcttcagttgcagtcgcctcttttcttttctctttcttctttctttctgtctttttttttttttttttttttgagacacagtttccctctgtcgcccgggctggagtgcagtggcgcgatctcggctcactgcaacaacctccacctcccgggatcaagcgattctcgtgcctcagcctccctagtagctggaattacaggcgccaccaagcccagctaattttttttcttttttcttttttagttgagaaggggtttcaccatgttggccaggcaggtctggtactcccgacctcaagtgatctgccctccttggcctcccgaattgctggggttacaagcgtgagccacggcgcccggcctggagtcgccctgtttgcacctttgtctctcactctcttgtgtgtctgtgtccggctgtcccctctgggtctctgtctcttttgggatgtatctctgagtatctctatgggtcatttatttctgagattcgtcgttctgggggcctctgtatgggtccctctgccagcctctacgtctcggtctccgcctttattttgactcttggtctgtctccgtttatctcttgtctctcttggtctctttgtctctcctctctaggtctctttttgctcattatctcttagccctccatgtctctgtctcagggttcctcggccgctcccctttgggtctccccttggggtctctagaggacttagggtctccggagtcatatctcttgatctctccctgaccatcactccatgtgggtgctgccacagtcccggtggctgtcccatcctagggtcactctggcagctgcaaaccactgagcatgtgcacacacgccccattctctccccagagttcgctccagagtctccacctggattcttcgcaagactttctgagacctagcaggacctgagctgcggctatgactctggcaaaaggagtctggtcttgccggaacgggcgggggttgggggtgtgggccggggagatgccacagggtcattttcaggaactgaagggcgcagagacaagacggtggccttctagccactggtgtccggtgacactgcataaaaatagctccatcagatgggcttgggggaagtggaggggtttgatcactgagactcccaggaaagaagtcctggtcgccctctgctgggggtgtggagagaggtaggtactaagggttcgaacgccctgctaatcctggcactctttctcttcctgtcttccttccttccattccttctctcttcttttcttctttctttctttctttttttttttttcttgagaggagtttccctcttgttgtccaggctagagtgtggggacgtgatctcagctcactgcaacctccgcctgccagtttcaagcgattctcctgcctcagtctcctgagtagctgggactccaggcacccgtcaccacacccacctaatttttgtatttttagtagagacagggtttcaccatgttggccaggctggtctcgaactcctgacctcgtgaccgcctgccttggcctcccaaagttctgggattacagacgtgagccactgcacccggccttttctttctttttctttttcttgagacggagtcttgcagtcgcccaggctagagtgcagtgttgcgatcttggctcactgcaacctccgcctcctgaattcaagcaattctcctgccttagcctctggagtagctgggattacaggcgcccaccacacgcggctaattgtttgtgggcggcaagccacccaggtgccgaggcaagagaccgagggcacgagctgttccagtataataaaatatataaaataagaatagttatagtagatatagatcatagatatgattatatatgaatatcattaatcattagtttgtagcaattactctttattccaatattataataatcctcgctctacaatcataacctaggaaaaaccaggccatacagagataggagctgaggggacatagcgagaagtgaccagaagacaagagtgcgagccttctgttatgcctggacagggccaccagagggctccttggtctagcggtaacaccagcgtctgggaacacgcccgttgccaagtggaccatggtctagtggtagcctcagtgccaaggaaaaccacccgctacttagcagaccaggaaagggagtctctctttccctgggggagtttagagaagactctacccctccacctcttgtggagggcctgacatcagtcaggctcacccgcagttacccagaggcctaaccatctccctgtgatgctgtgcttcagctcctagtccgctttcatgttccatcctgtacacctggctctgccttctagatagcagtagcaaattagtgaaagtactaaaagtctctgatatgcagaaataatggcgtaagctgtctctctttctcctctctctctgcctcggctgccaggcagggaagggctccctgtccagtggatacgtgacccaggggaccttacctatccttggagatgtctcacactcctcaccctgcctctttgtcttatatccaataaatatcagcacagccaggcattcggggccactaccggtctctgtgtcttggtggtggtggttccccgggcccagctgtcttttcttttatctctttgtcttgtgtctttatttccacaatctctcgtctctgcaaacggagaaaaacccaccgaccctgtggggctggaccctacaattgttgtatttttagtagagacaaggt[136 bp omitted]ctttctttctttattttttgagacagggtctcagtctgttgcccaggctggagtctagtggcacaatcttggctcactgcagcctcgactttctgggctcaaacgatcctcccacttcttttttttttttttttttttgagacggagtttcgctcttgtcacccaggctggagtgcaatggtgcaatctcggtttaccacagcctccgcctcccaggttcaagtgattctcctgcctcagcctctcaagtagctgggattgcaggcatgtgtcaccatgcccagctaattttgtatttttagtagagactaaaatacatgttctccatgttgatcagtctggtctcgaactcctgacctcaggtgatacgcccaccttggcctcccaaagtgctgagattacaggcatgagccaccccacctggcccctcccacctcttctaagtaactgggactataggcgtgagccaccatgcatggctattttttgtaatttttgtagagacagggtcttgctatgttgcccacgctgctcttctactcctgagcccaagcaatccaccgtactaggcctctccaagtgctaggattacaggtgtaagccactgcacccaccctgtctgggattctatgtcccctggacttctatgtccctctctctaggtctctatcttccctctgtctgggtctgtgtccatttatttcacggtctttggccttctctatctctctctgtccaccatctttctggtctctgtctcctattttctcccattctcgtttttttttttttttttttttttttttttgagtcacagtctcgctcttgttgcccaggctggagtgcagtggcacgatctcagctcactgcaagctccacctcccaggttcatgccattctcctgccac[222 bp omitted]gctctgtcgcccaggctggagtgcagtggtgtgatctcggctcactgcaacctccacctcctgggttcaagtgattctcctgcctcagcctcctgagtagctgggattacaggtgtgcgcaaccacaccaggctaatttttgtatttttagtagagatggggtttcaccatgttggccaggctggtctcgaacttctgacctcatgatccgcccacctcggcctcccaaagtgctgggatcacaagcgtgagccaccacacccaacctaatttttgtatttttagtagagatgaggtttcaccatgttggctaggctggtctcgaactcctgaccttaagtgatccacttgacttggcctcccaaagtgctgagattataggcgtgcaccaccgcacccagccaaggtgccatttttttgctcaggaagttagaacaaaacttaaaaggtgggtcaggcacagtggctcactcctataatcccatcactttgggaggccgaggtggctggattgcctgaggtcaggagttcaagacaaacctagtaaacatggtgaaaccccatttctactaaaaatacaaaaataagctgggccgggtggctcgcgcctgtaatcccagctactctggaggctgaggtaggagaatcacttgaacctgggaggtggaggttgcagtgacctgagatggcaccactgcactccagcctgggcaacagagtgagactctgtctcaaaaacaaaacaaaacaaaaagccaggtgtggtcatgcacatcagtaatccagctacttgggaggctgaggtggaagggtcatttgagccaaggaagtcaaagctgcagtgagctatgatcacaccactgcactccagcctgggtgacaaagcaagaccctgtctcaaaaaaataaaagataaaaaattaaggctgatgagttagggatattatcttggatcatttgggtaggcccactaatcataagggtctttaaaagagggacgtggctgggtgcagtggctcactcctgtaatcccagcactttgggagcctgaggcaggtggatcacctgaggccaggagttcaagaccagaccggccaacatggcaaaaccccatccctactaaaaataacaaaaattagctggacatggtggtgggcgcctgtaatcccagcgactggggaggctgaggcaggagaatcacttgaacccagaaggtggaggctgcagtgcactgagattgagccaccgcactccagcctgggcaacagagtgagactctgtctcacaaataaaaaatcaaaaaaaaagagggatgcaggaaggtctgattcatggaagatgtgaggatggacatagaggtcagagaagagaggatgccatggtgctggctttgaagtttgaagacggaggaacggccatgagccaaggaatgggggcggcttcccgaagcttgaaaaggcaaggaaacagactctcccctagagcctccagaggaaacagagccctgttttcgacgtctaacctctagaattgcattctaataaacttgtgttgttttaagccactaagttcgtggtaagttgttgtagcggcaacaagaaaataatacagtcagactctccaattcctcagagtcattctctgaggttatggta[138 bp omitted]gcctc[225 bp omitted]aggctggagtgcagtggtgcgatctcggttcactgcaacctccgcctcctgggttcaagcaagtcttctgcttcagcctcctgagtagttgagattacaggtgtgcgccaccatgcccggctaattttctttaaaatttttggtagagataaggtctcactatgttgtccaggccgatcttaaattcctgggctcaaacaatcctctggcctcagcctcccaaagcgctaggattacatgtgtgagccactggccctgctctgccttttttttttttttttttttttttttttgagatggagtctcactctgtcacccagtctggagtgcagtggcccaatcttggctcactgcaacttccacctccacagacgcgtgccaccacgcccggctaaaattttttttgtattttaagtagagatggggtttcactgtgttatccaggctggtctcaatttcctgaccttgtgatccacctggcttggcctcccaaagttctgggattacaggcatgagccaccgtgcccgggctaatttttggtctcaatatgttggccaggctggtctcgaactcctgacctgaggtaatcctcccacatcagccttccaaagcgctgggattacaagtgcgagctattgtgttgggcctgttttgtttcattttcactttgaactatttgtagccttacagaagagttgcaaagattgtacagacatttaaaaaatatccatcacccaggttccccaaatgttagaatgttgcattgctttggcaacgtttgttaaagctcagacattggccggagcagtgcctcgcgcctgtagtcctagcactttgggaggctagaggggacggatcacctgaggtcaggagtttgagaccagcctggccaacatggtgaaaccccgactctactaaaagtacaaaaattagctgggcgtggtggcgggtgcctgtagtcccagctactcgggaggctgaggcaggagaatggcttgaacccgggaggtggaagttgcagtgagccaagatcgcaccactgcactccagcctgggtgagagagccagactctgtctcaaaaccaagacattgaggtggcacaatacttttgacaaaatgaaagagttcattcaggttttctatatttccactaatgtctttttcccacgccaggctgcagtcggggttactatgttgcatttggttgtcatacctccttagtcttctgcaatctgtgatagtttgttactttttccttgtctttcatgatctggaaactagaagaatactagtcagttgttttgtagactgtctctcaatttgtgttcctctgatctgttatcttgcttggattgaggttatactttttgttgggtgggggtagagagaatgccacagagaggcattgctcttctcattatatcatactggggggtgtatgatgtccatatgccatatcactggtgatgttaacattttttttcttgagacaaggtctcactctgttgcccaggctggagtgcagtgttgtaatcatagttcactgcagccttgacctcccaggctcaaacagatcctcccacttcagcctctcaagtagctgggactacagacctgagccaccacacccgaataatttaaatctatctttctttctctttcttttcttctatttctttttgttgttgttgttgtttttgacgtagtttggctcttgttgcccaggctggagtacaatggcgcgatcttggcgattctcctgcctcagcctcctgagcagctgggattacaggtgtgtgccaccacacctggctgatttttgtatttttagtagagatagggtttcactgtgttggccaggctggtcttgaactcctgatctcaggtgatccacccacctcggccttccaaagtgctgggattacaggcg[146 bp omitted]agtgaagccccgtctctactaaaaatacaaaaaattagccgagtgtggtggcaggcgcctgtagtcccagctacccaggaggctgtggcaggagaatgacatgaacctgggaggcggagcttgcagtgaatcgagattgcgccactgcactccagcctgggtggcagagcaagactctgtcttaaataaataaataaataaagagaggcagccaggctctgtggcacatgcctgtagtcccagctacttggaggctgaggcagaaggattgtttgagcccaggaagttctgggctgtagtgtgttatgctgattaggtgtccatactaagtttggcttcaatatggtaacctcccatgcgtgggagactaccaggttgcctagcaggggttgaactgacctaggctggaaatggatcaggtcaaaactcccatgttgatcaggagtgggatcatgcctatgaatagccactgcacatgagcctgagtgacacagtgagaccctgtctctgaaaaatcaatcaataaataggaagcacagcataaaagtttagaaaagtcacaacctggcaatgtggtagagaagggaagagcattttttaggagagaaatagaagcaggctgtattgccttgctggagaggttgcgtgactaaaaggaagccaagtgctaacatccaagacaatgggaaaaaggccttgaaggcatttcaggagtcttcaaaacagcctcccccatcacaggctctgaggcatataaggaaagagtggtttactgggccagatccagggccctgtctcctgctcagcctggggacactgctcccctgcatccctgctgttcgatcaccagccatgacacacagggtcccaagtacagcttgggccaccactccagagggtgcaagccataaactttggcagctttcatgtgggattaagcctgcaggtgcacagaatgcaagagtgaaggaagcttagcagctcccacctggatttcagaggatgtgtaggaaagcctgggtgtccaggcagaagtcggctgcatggttggagtccctacagagagcctctactaggacagtgccaagggggaaaggtggggttggaggcctaacatagagtccccaccagggcgctgcctagtggagctgtgagaaggggacccctcctctctagatcccagagtgacaggtctgccagcagattgcaccctgagcctacaacagctgcaggcactaaactccaacctgtgtgaggagacattggggctggactttgctgcccaagactttgggagcccactccttgcaccagtgtgccttggatgcagaacatggaatcagggattattttggagctttaaagtttttttttgtttttgtttttgttttgagacagagtctttctctgttgctcaggctggagtgtagtggtgcaatcttggctcacgacaaccttcgcctcccgagttcaagcaattcttctgtctcagcctcctgagtagctgggattacaggcacctgccaccacacctggctaatttttgtatttttagtagagatgaggtttcaccatcttggccaggctggtcttgaactcctgacctcgtgatccatccacctcggcctcccaaagtgctgagatgacaggtgtgagccactgtgccaggctagagctttaaagtttaatgtcttctctgctgtgtttcagacttctgttaagcctattgtccctttcctttggcagatttctcccttttattttattattattattattttatttttattgttgttgttttgagacaaagtctcgctctgttgccacgctggagtatagtggcacgatcctggctcaccgcaacctctgcttcctgggttcaagcaattctcctgcctcagcctcccaagtagctgggacaacaggcacgtgccaccatacccagctaatttttgtatttttagtagagacagggtttcaccatgttggccaggatggtctcgatctcttgacctcatgatctgcctgcctcagcctcccaaagtgccaggattacaggtgtgagccaccgtgcccagccatcattattattttttgagatagagtcttgctctgtccaggctggagtgcagttgcacagtctcagctcactgcaacctccacctcccagattcaagcgattctcctgccttagccttcaaagtagctgggattacaggtgcatgccaccatgtccagctaatttttgtatttttagtagagaaggggtttcgccatgttgcccaggctggtcttgaactcctgatctcagggatcctcctaccttggcctcccaaagtgctgggattacaggtgtgagccaccacacccggcctattttatttgtttttttgagacagattctcactctgttgcccaggctggagtgcagtcgtgcaatctctgcctcccgggttcaagcaattctcctgcctcagcttcccaggtagctggaattacaggtgcgtgccaccactcccagctaatttttgtatttttagtagagatgggatttca[131 bp omitted]gagacggagtctcgctctgtcgcccaggctggagtctagtggcacaatcttggctcactgcagcctcaactttctcggctcaaacgatcctcccacttcttttttttatttgagacggagttttgctcttgtctcccaggctggagtgcaatggtgccatcttggctcaccacaacctctgcctcccaggttcaagtgattctcctgcctcagcctctcaagtagctgggattataggcatgtgccaccatgcccagctaattttgtatttttagtagagacggggtttctccat[134 bp omitted]aataatttctgtagttattaaacaggctattgaatccatccacaaaacttaagatacaatacttaagaacagggctctaaataacaagtgccagctctctgatctcatggccaacaacctgagattcctgccatctggtctcagttcaggacctttgcacttactgttaaacaccgcccccccggccccaccccagatctcgcttctatctgtcctttattcaaatgttacctcttcagaggggccttccattatcaccctttctaaaacagcctcgctctcacttcccatccctttattctgctccatcgttcttcattatgctggccactatctcaaattatcttttattatttatttatttatttacttttgagacggagtcgctctgtcgcccaggctggagtgcaatggcacgacctcggctcactgcaacctccgcctcccgagttcaagcgattctcccgcctcagcctccagagtaaccgggcttacaggcgcgcacggccacgcccggctaatttttgtatttttagtagagacgggctttcaccatgttggtcaggttggtctcacactcctgacctcaggtgatctgcccgcctcagcctcccaaaagttctgggattacaggcgtgatccaccgcgcctggcctcaaattatctttattcagttaaatgcttttattgtctctcccagtacaatgtaagccctagcagcagaagactttgctttaatcacgtgctgtacccccaaagcccagacagtgcctagcacacacgagatgctcgatgaatagttattgattgaatagattagacatcaacgcaatcaggctgttcacctagggactctttgctaggcggcggagaggtacgttacagttctctacgcaaaacgcatgcgcgaaagatccgggaagtgtgatcggaaaggggcggagcatcagggagagtctcgcggacataggcggttcggcgcggaaagcgggaggtggaggggcggcttggggcaagcgcgcgcgcgcagtgcagaagccagccccccgcggctgaggtactcaaggtgcccaaaggcggggtagtgacctcgcgcgtgcgctgtgcccgcggcagcgccgggtcctagtgtgtgggttgttgttggcaccgcacggcgcgtgcgcagtgaggacggcggagggatttgcggccgggacccaccccctgctccagtcgctatcggaggccgcgcgggtggctgagcagcggcctggtgcgctcgcttagcgggcgacggaatcagacggacgtggacgcccccggagtggaagccgaagcaggagttgttgttgctgaggggctgccgcagccgccgcgagcctccggacagacgccagagcgaggagggcgctacgcggtgagtgagtgtgactgagtggcccgacggggtgcggggccgctacccagaagccccagcggtgggcccggtcctcttccccgcggccaggcccctttcccgcgtccccgccacaggtcccttctgcatccctttcccggaccccgaaatctctgggcacccacgcccgcttcccacagcgccctcgtggttccctacccacaggcccttgcggtgtgtggccttttttctttttcgtttgtctatgttgtcctggacccttacccataattcctttcgctttttgcggggtccaggtctgttacccacaagcacttggttttggggcttcgctccttatgtttctctttctttgcttggaaacttccgatccccaggaccctgcaaactgcatctcgtaatttgccctccacggcacgggacgagcagccacagctgctctgggcctccctcctcgggtccttgatttccccagaaattcccagggaacctctccgccccacagctcgtgtcagaggactctgagacttcactcttcaggaacccttttccagccgttatttttgttttctttaccggcctttcacctccacccccaccaagacgtacccttttctccgcaacacaggactgttctctgcccttacagagcctgttttaattccgagacttttctcctgtctttcttattttgagagtcaaggagtaacaggggctttctctgtgcagacccgatctaacctaaggctgtcctgcttctgctctcagacttggcaagatgacccagttcctgccgcccaaccttctggccctctttgccccccgtgaccctattccatacctgccacccctggagaaactgccacatgaaaaacaccacaatcaaccttattgtggcattgcgccgtacattcgagagtttgaggtgagttcactgagcaggccaggaatggtttgggttctggggagcaacgggttggatttgcgagtccagcttctggccattttgccagctgcgtgatttaagcgaggggcttaacctttgtgatcctcagtttctctgttttaaatggggttggagccgggtgtcgggtgtggtcgagtgcgtctgtagtctcagctactcaggaggctgaggtgggaggattgcttgagcccaggagtcggaggctggagtgctttgtgattgtgccactatactccggcctgggtgacagagcaggacttcgtctctcaaaaaaaaaattttttttttaagtggggttgtggcccggtacggtggctcacgcctgtaatcccagtactttgggagaccgaggcaggcggatcacttgaggtgaggagttgaagaccagcctggccaacatggtgaaaccacgtctctgctaaaaataacaaaaattagccggacatggtgcctgtaattccagctacttgggaggctgaggcacgggaatcacttgaacccaggaggcggaggttgcaatgagccgagatcgcgccactgcactccatcctgagcaacagaacaagactgtctcaaaaaaaaaaaaaaaaaaaaagtggggttgatagtacaccttttgtagaatttttgtgaaaattcagtgagtagtggttgaggattcatgcctaacccacaccatttatcagctctgactttgggcaaatgttgtatcctcttaatgcattggtttctttatctttagcaaggggatagtggtagcacccttataatgttggtggagaattaaatggcaaactgtatgtcagggggcttggcaccaagcagtcagcacatgtcagcctttgttactctgtttactacttttattgttaataagatgatgttcataaaggcttagcacccagtattgagtattggagggcttaaaactgcagatggggatcttagctctgcacctttgggataaataggaatgaatgacttaggctcctggacctctgtgtttttatttgtgaaatgggatgacaagggtcatctcttaggtgcatcagagcacacctgagaaaagctggcacacagtcggaagttacaagaagaacgttctagcattgggtaggtaagggcagctggaggcgagggagttgcagagcagaatttcgtagataacagaaaggtatgtcttcagtgggatttgccacccttggtgaacccgcacttgagagatattactggccaattaacttaatgggcacaggcgggtggtaggtgccctttgatgatgcaggtcatgtgccagttaccatttatttatttatgagacagttttgctctgttgcccaggctggagtgcagtggcgtgattttagccaactgcagcctccggttcaagcagttctcctgcctcagcctctcaagtagctgggattacaggcatgcaccaccacgcctggctaattttgtatttttagtagagatggggtttcaccatgtaggccaggctggtttcgaacccctaacctcaggtgatccaccccccttggcctcccagagtgctgggattacaggtgtgagccaccatgcctgggagccaggtactttttttttttttttttttttgacttggagtctcgctctgttgcctaggctggagtgcagtggcgtgatctcggctcactgcaagc[135 bp omitted]gatctcctgaccttgtgatctgcccactttggccttccaaagtgctgggattacagacgtgagccaccgcacccgaccttttttttttttttttgagatggagtatcgctctgttgcccaggctggagtgcagtggcgtgatctaggctcactgcaacttccacctcccgggttcaaaggattctcctgcctcagcctcctgagtagctgggattacaggcacgcgctaccatgcctggctaatttttgtattttttgtaaagacggggtttcaccatgttggtcaggatggtctcaaactcctgaccttgtgatctgtctgccttggcctcccaaagtgctgggattacaggcatgagccactgcaccctaccagccagttcctatttaatgtgtggttgatgagacctttaagagctgccttggccctcagagggtgtgcagttgtgggctttggagccctgttctgtcagcttatgttgctttaggcctggtcatcctcactggcactcataagcagggccctgccatcactccactcccatcacatcctctggcactttgttcaatgtgagtgatacttggagctgtgagaagcaatgtctttcctaaatatggaagacagggtgtttcctaaatactataaagctagatgtcacctgtaccagtgcttttcaaactgtctttggtgaaggacagatactgtttccaatctgtttgcttttgataaatatgatagaattactttttaaagaaagatctacagtcaggagttcaagaccagccaggccaacatggtgaaaccctgtctctactaaaaatgcaaaaactagccaacatgctgtcgtgtgcctgtaatcccaggtactcactcaggaggcttaggcaggagaaccgcttgaacgattctagtcagttgctgggttccttttagagagacgggcacaggggggaaagcagggcttagaatcgcttgaacctgggaagcggaggttgcagtgagcccagatcgcgccattgcacaccagcctgggcaacagaccacaacttcgtctcagaaaaaaaaaagacctacagaataaaagaccaaatttgtattaagagtcagtggacatcaaattgtgaaattactgtagaagttcctgaacacttagtcctggtttctgtacttatcacagtccagcaacagtttagatagtactggtccatggaccatgcttagtttttgagacaggattttttttttttttttttttttttgagacggaatcttgctctgttgtgcaggctggagtgcagtggtgcgatctcggctcactgcaacctccgcctcctgggttcatgccattctcctgcctcagcctcccgagtagctgggactacaggcgcccaccaccacgcccggctaattttttgtatttttagtagaggtggggttt[136 bp omitted]gatggtgtttcactgtgttgtcccaggctggtctgaaacccctaggctcaagcattctccctgtgtcatcatcccaaagtgctgcgattacaagtggaagccactgtgcgtggctgcagaccttgctttgatctgtgccactcccctccctccactgtgtcaggggaagtgtgcgtggatgtttatttttgtagggggtgggggtgggagggttaacctgtttatttccttggtgagtgtcccttgccatttcccccagtccttcccaccctgtcacctctcttcttgttcccaggaccctcgagatgcccctcctccaactcgtgctgaaacccgagaggagcgcatggagaggaaagtatgtcatttttgcttcctgaccccctgttttaccactgtctccagatgatccttgacactagggcacttctatctgcattcacttctccacctcccctttctcctgacagagacgggaaaagattgagcggcgacagcaagaagtggagacagagcttaaaatgtgtaagtctctcatccaccatttggctctctcctctcccaaaccctctgtattcttcccaggtcatacccaggaccctgctgtctccctaaggcctgtgttgtggggaacagggttgttagttcatttgtttagcccctgccacttcacaagcactgtttttggtttaggcttttcagcagcagaacatagggtaaaagttggcaggaagggagacccctggtaccttgggctcctcctgcatgggaggacagttaaggggctcccacaacccagctgggtgtcacaggctgaagtggtgggttgtgggatagtggtctgtcctggctctaaccttaggtccccaacccttgggctgaggatgttccatcccctccacatagaggaggaattggagtacaagacaggtgtgttgttgccattaaccaaactcataagagggtcagatgtcaacctccagtggctctttattctgaaagtgaaaactgtacagtcacaggcagcatagcagtgtttcactcagcaggggaccgtggatgtgatggtgatcctataagattatatcatattttgccaggcactgtggctcacgctgtaatcccagtactttgggaggccgaggcaggcggatcatgaggtcaggagttcgagaccagcctggccagcgtggtgaaatcctgtctctactaaaagtacaaaaattagctgggcgtggtggcgagcgtctgtaatcccagctactcgggagactgaggcaggagaatctcctgaacccagaaggcggaggttgcagtgagccgggatcgcgtcggctcactgcaacccagcctgggcaacaagcaaaaatctgtcttaaaaaaaaaaaagattataccgtctatttactgtaccctttctatgctttgataacgtttagatgcacaaatacttactattgtgttaggattgctgtagtatttggtgtagtaacacgcttggcctcggagcagtgggacgcaccctctagcccaggagtgttaggtatgctgtctaggctcgtggaagtgccatctcatgttggcatatcgacatcatcatcaaacgacgcacttctcagaacatgactctagtgagaagacaggttttcctcctatacctgtgaactttgatgaatccctttcctccaaatcctggagtgcaggatttcctcacggtgcttacgcagaagcgtgacagagacatctggcggtgcactctttggacattggctgtcggaacgctgtcttgatgtcctgcctcagaggcatctcagactcagtgtccaaaccacaggggttttccctcgccaccaacctggtttcctttgggtgttttctctgggacatagacattcagctgtgccggtcatgacctcattttttgccatgcagtttgtttctaacaccttttctaaccttttgctcagcctctcaccaagacctatttgtgttattttctaaatgtcacaaatctgacccttcttttcatgtccatcatcaccacccaggtcacctcttgcctagacaacacagtcacagtcttaactagtttacctatgtctttttgtttgtttgtttgtttgtttgttttttggaggcagcctcgctctgtcgccaggctggagtgcagtggtgcaatcttggctcactgcaccctccgcctcccaggttcaagtgattctcctgcttcagcctcccaagtagctgggactacaggcgtgcgtcaccacgcccagctaatttttgtatttttagtagaggcggggtttcagcatgttgaccaggatcgtctagatctcttgaccttgtgatctgcccaccttggcctcccaaagtgctgggattataggcatgagccaccgtgcctggtcacccccctccttttttttttgagacggagtcacgctctctcaatcaggctggagtgcagtggtactatcttagctcactgcaacttccgcctcctgggttcaagtgattctcctgcctcagccttctgagcagctgggactacaggcgtgcgccaccatgcccaggtaatttttgtaattttagtagagatggggtttcaccatgttggccaggctggcctcgaactcctgacctcaggtgatccacctgcttcagcctcccaaagtgctgggattacaggcatgagccaccgcagccggcctagtttgtctatatcttaaccaaccacatccactgtgggtcttcttttttttcttttttggaaaaactttaaaactgagacggggtctcactatgttgcccaggctggtcttgaattcctgggctcaagtgatcctcttgcctcagcctccctcagtgctggattacaggtgtcagccattgtgctcagcctcttttttttttgttgtgttttgttttgttcttagggacagggtcgtgctgtgttgcccaggctttactgccgtggtgcagtcatagctcactgcaaccttgaattcctggcctcaggtgatctgtctgcctcggcccccagagtgttgggatttcaggtgtgagccaccatgcccagccaaaagtgtttttcattttttgttttttgttttttagatggagttttgctgttattgcccaggctggagtgtagtggtacgatctagggtcactgcaacctctgcctccccggttcaagcgatttccctgcctcctgagtagctgggattacaggcatgcaccaccatgcctggctaattttgtatttttagagacagggtttctccatgttggtcaggctgttctcgaactcccgacctcaggtgatctgcccgcctcggtctcccaaagtgctgggattacagggcgtagccaccacacccggccagaaatgctttttaaaaacggttccacccgggcgtggtggctcacgcctgtaatccttcaaggcaggtgggtcacctgaggttgggagttcgagaccagcctggccaacatggtgaaaccctgtttctgctaagaatacaaaaattagcccggcgtggtgatgtgtacctgtaatcccagctactcgggaggctgaggcaagagaatcctttgaacctgggaggcggaggttgcagtgagccgagatcacgccattgcactccagcctgggtgacagaacaagattccatctcaaaaaaaaaaaaaacaaaaaaaaaaacagttccaggccaggcacggaggctcatgcctgttgtccagcactttgggaggctgaggcaggcagatcacatgaggtcaggagttcaagaccagcctggccaacatggtgaaaccccatctctactaaaaataccaaaacaaaaacaaaaacaaaaacaaaacaaaacctagccaggcattgtagtgggctcctgtaatcccagctactcgggaggctgaggctggagaattgcttgaacccgggaggcggagtttgcagtgagcagagatagcgccattacactccagcccgggcaataagagcaagactccttctcaaaaaacaaacaagtaagttccaattgggcgaacaaaaaagttccaattgaggaatttgaacactggatcatagatgaggttaaggaattagtaaatgttaactctaagatgtaatagtggcactgtggttatgatgtttaaaagcctttgttagagaccaaaatggtgtgctatctggaatttcatttaaaataatccagccggtcgtggtggttcacgcctgtaatcccagcactctgggaggctgaggtgggaggattacttgagtgatccaggttcgagtggtgaatatggtgaaaccctgtctcaactgaaaatataaaaattatctgggtgtggtagcaggggcctctaattgcaactacttgggaggctgaggcaggagaatcacttgaactcaggaggcagaggttggggtgagctgaggtcatgccactgcactccagccggggtgacagagcaagactccgtctcaaaaaaatgcagtgggctgtgggaggatagggatgaaacaagtccgtccacgtgttgataatggaagcgggctcatgggagttcgttatactgctctgcctccattaaatgcttgaacttctccataatagaaaagaaataaaagaatggatcaagttcagtagggtttctgtgcccttgagagcctccactcatagctatagaagcttgctgtgccttgtcacaatgaacagctcccgtcaaggggacggtgcctccttgctgagcgcttgtacttggtgttactgactttctcacagcttccaagtgcagcaggggttgctactcccatttttaagataaagaaatggaggcttgttgaggcaagcacgcttccaaagagtgagagttccaagatgggacctcgagtacctcaaagcctaattcccaactccacgacccacttccgttgagtctctgctctgggctgctacttagatgagccctcaaccagtgatgtcctgagggagagctgccgtcagggcgctgcacgcatacgctggctgtggggcgctgcccggcattgggtctgtgctaccttctttgagcttttgttctctatcttcaggacttgggggtaccattgctttgctgcatttgctttttacctttagtcacatttgtggcccccccaccccgggtaagcaagtgctccagggaactcacacagtgtgctggggtggtttccctctggctgcccttcaggaagctcagctgttgtttggccttcgtccactccccagccctgcagcattcattggtcccactgtcatgctccacagtaactgttagaatgcctgctgtctggcgttgccgggtgtgtttccttgctgctgtgacagctttcagctcttcattaaatgttagcatcttgtgaggctttttctaacctgccttgtaaagtcacccgtttctattctctgtcgtcatctgatgtgatcataggatctccttatttacctctttcattagcatatgaaccccatgagggtagacacctttttttttttttttttggagacagtctcactctgttgcacaggatagactgtagtggcacgatctcggtttactgcaaccttcatcgcctccctggttcaagcgattctcttgtcttagtctcctgagtagctggaccacacccagctaattttttgtgtatttttagtagggatgaggtttcgctgtgttgatcaggctggtcttcttgaactcttggtcacaagtgatccgcctgccttggcctcccaaagtgctggcattacagctgtgagccactgcgcccagcacctttttttgtcttgtttactgcgaaatccccaacaactatagcatttccaggcacatagtagatgcttaagaattacttacttacaagagcacaaacatcggcgaataaaaagaattacctattgaatgaatgagagttagctggtgcaaaaaaaaaaaaaaaaaaagccagtgcagattgagagacctggccatagaaaattacaacgctcagggataaggtatggcaaggaacgttttttgttttttgttttttttttcgctttattgccgaggctggagttcagtggtatgatctcggctcactgcaatctccacctcccagattcaagcaattctcctgcgtcagcctcccgagtagctgggactataggcgcacaccaccatgccctggtaattttgtatttttagtagagacggggtttcgccatgtttgccaggctggtctcaaacacctgacctcaggtgatccgtccgccttagcctcccaaattgctgggattacaggtgtgagccactgtgcccagcctggcaaggaacttgaggagtgggtggagagaacgctgagatggagttgttttcagacgtttccatttgtcccagatagcgattcccttaaattgtggcttaggcttctgttttctaaaatattcttaggccaggtgcggtggctcacgcctgtaatgccagcactttgggaggccgag[131 bp omitted]ctgaggcaggagaatcgcttgaacccgggaggcggaggttgcagtaagccgagatctcgccatccattgcactgaccttgggcaacaagagtgacactccatctcaaaaaaagtacattccttaaagtcatcttgaccttagtttatacttg[132 bp omitted]cgaaaccccatctctactaacaatacaaaaattagctggatgtggtggtgcacgcctgtaatcccagctgcttgagaagctgaggcaggagaattgcttgaacctcggaggcagaggttgcagtgagacgagattgcgccattgcactttaagcctgggcaacagagcaagactctgtttaaaaaaaaaaaaaatctgagactttatttctctagcttctggcaacacccacactgtcttcctgaaaaggtagcacccgagggttcggggaaggagcctggtagttcaagtgcccggggtgagaggtgaagtctgccttggcccttcgccactttaacacctccctttttctgtgtctcgagtttgttctgttttacttccatttgcaaaatagtaataaataaatatcagtgtccagcactgtgtctgggccatagtacgtgttcagtaaattatatgtctaatgttccattattggaacgctaagcatgtgggagttatttatatcctactgctcgggtcatcaccagggtctgatttttcacacgtgtctgcaattcaaaaaattgcaacctctggcataaatgggttaatgttattccttttctcatgctctcccagaatgtgacagggcttccgagggaaacactataccatggaagaaccggcagagtgtccttaaggccccggcaggagtcagggtcattatgtgctggagccaccatatttggtgaaaaggacttattcccaggcctgacccagcaggatcacctatgaaattggtttcttaggagattcctggctcttttctttggagattgttattccttagtagccaggtagaacagtttgcctcacagtagtgaggctggagtgagaatctgatctgacgctagtcagttcctgggttcctttttagagacacagggcacagacaggaaagcagagcttacttagtgtttgctttcctggctctcattcttagccttggggcagcttggtctcaggttttcctgtgggctgtagttgcagtctgtgtccagtaggtggcagtgtggccctgcctacaggagggagctcagaacctgggggcatcagctgcatctccagggaggcccagttgggctattactgtttggatcaccttgcatctgggagcgatagggcccttagggtttatgtaggtctgaaatggcagttgggcctgcccacatcctgtcagcttgaagtcagccttacctcctctcctcagcagcctggattatctctcagccactctgataaagcccactgtgcctcagagaaacaggttcagagaggggcgtccctgaggttgccaggtcaccacccatgttcctccagttaggggcctctcccaatgccaccgttttcttcttggcctctgcccatcgtatttgttttgctacctgagaccatggacaccttcaacttataaaattcctttcttcctgcacaggggaccctcacaatgatcccaatgctcagggggatgccttcaagactctcttcgtggcgagagtggtaagtccccagctcctagctcctggaaccccacgctgctgagagcctgggtctggcacaaaggtcaaataggctaggtacaggggaatgttccaggggctgtgggacagctctgttctcccatttaacgtcatatccatctccttgtagaattatgacacaacagaatccaagctccggagagagtttgaggtgtacggacctatcaaaagagtaagtggagtgggtcagggtgtttgaattgggggtgcatggaggaggggctgtatcctgagagggagggagagaggtcccagccctgagcatggctcacaccatttcagggcctggatttatgcatcctgactgtatctccatgcagcagaccttgggcagcagaagtaaaatgagaagtaatgactgctggtggttggttgagagcaggggttggcaaactacagacttaaagttttcctgctgctcagccaggcaggtctgtttgtttacacattgtctttggctgctactgttgtaaggcagggttggattgttgcaacagtatacggccgtccaagctggaaatatctactctctgggtcttggcagaatacctatgctgagtcccgttttagaggaaggctttgttttaccaatcttcttttaagtcactgaagtgctctgtgtctgatttcctttatctaacatgggagacgcatgccttcactgggcagtagtgagggcttgaggccatcctacacacaaactgatgttagccatgtctcttctccctgctctgtttctgatacgtcttttaaaaatatttatacatgtcaggccgggtgcaatggctcacacctgtaatctcagctcttaaggaggcagaggcgggaggatagcttaaacccaggagttcgagacctgcctgggcaatatagca[143 bp omitted]tgaaacctggtctgtacaaaaaaaaaaaaaatacaaaaattagctgggcatgatagcgggcgcccgtaatcccagctactgaggaggctgaggcaggagaattgcttgaacccaggaggcggaggttgcagtgagccgagatcacaccactgtactccagcctgggcaacagagtgggactccatcttaaaaaaaaaaaaaagtattgtaggctgggcgtggtagctcacgcctgtaatcccacatgttgggagggcgaggcaggcagatcacctgaggtcaggaggcaagaccagcctggccaacatggcgaaaccccgtctctacaaaaatacaaaagattagccgagtgtggtgtctcgtgcctgtgtgtgtgtgtgtatgtgcatgtgtatatatgtgtacacacacacacacacgttgttctgccttgcacagcccagtgacaaccttggccccacccttgtccctctgatccattcaagtcaggaatcttggttgtgttttggaggctgtggggtcccaggttcatccatgatacaggttggtcgccaactggtagtgatgtgaatggcgaactagccatcctttagggaccagctcaaatgctgttacctcccagaaatcttccctggttcattctggccacctctgtctcaacagccctgccttgcccgttgttctccctgacatggtccccaaggggtctttctgacatccagagctgaccccatctctgctgacagcatcccatgggtccctagcatgttaggacaggtccagctgccaccatctggccttccagggctcttccccaagctgtgtggcctcatggacctccaccccaccccatctcctcccttctcttgctgccatcctcgggatgggacgcatccctcatcgtgccacgttctctcaagcctccctggctgtgcacgtgtcctttctttttcccttagaacttccctgtccttggccaggcacagtggctcacgcccgtaatcccagcactttgggaggccgagaagggcagatcatgaggtcaggatttcaagaccagcctggccaacatggtgaaaccccatctctactaaagatacaaaaaattacccaggtgtggtggcgcacgcctgtaatcccagctacttgggaggctgaggcaggagaatcgcttgaacccgggaggtgcaggttgcagtgagctgagattgagccattgcactctagcctgggcaacagagcaagactctgtctccaaaaaaaaaaaaaaaaaaaagaattcccgtcccattggcattcacaactccctcctgtttccctaattccatttgtgtcctcctgactccacgtagaccacccacattggcccttccttgctcaacacccttcccagctcctcagcgaccacacttctcggcctggcattggggcgcttgatgaccccgggcctgcccacctttgtggcttcatctcctgggactctctgtcatcagtacatgagccagccctgccgaagcgcatccccagcctcctgccctcctgcccccgggcccttggacctctggagttactgctattccacctgacaggctgacacctcactgtcttccttcatctctcttctttctttaggtcttagcttaagtgtcattttctccaggaagccgcctctgtgtcctctgctcctgccattagaacataagtcactcagggctcttgaaggacagagagggtctgaggcctcatccggcccagggcctggtgtgcaggctgttgtggggttggtggggcggagccgccctgtggcaggactcacccctgtccccatgtgccccacagatacacatggtctacagtaagcggtcaggaaagccccgtggctatgccttcatcgagtacgaacacgagcgagacatgcactgtgagtacctcccgccgagccctgccctctgacctgctctcacttctctgctgccccagcccctcccagtctgtcccctcccccaccctgccacacctgacattagcgatgtctcttctcctcctccctctgtttctgatgtatcttttttttttttatatacgtgttttttaaaaaacaaaaaccaaatcccccacaacgtgtgtgtgtgtgtgaacctggggaggtaagtgtcacacgttgaacctcaggggcaaagagggaactgggtggggggctggggccagctggaggtggggggaggggtcggattttgggggaacctcccccattccccccactgaagttgggggtggccaggttgcaatgaggactggcctttgaacctgccctctcttccccccccagtagaactggggctgggccacccgaccctccgcttccccaaccctggccccccaccctgttcctcagcgggcagtggggtgataggcatgttgagcgcctgcccctacagttccaaagccccctttgaggctgccgcggcgtccacatgggcagggatgggtgggggagggtgggcagggctgcggcgtgtccaggggccgccgtattaattgactgttcttattgtcactgcagccaccacgcagctggcttgcagctgatgcttacgctccccttacaacacctcagtgtatggttggtataagggtttgtatcatgggtaagatcactcagcaccgcacaccagcccagcttagccaggcagctcaggagcagcgaggcgcccctcctcccaccccagtcgcccccgtagcctccccgcacccatggccctttccttgtttgggtgccctttgtccctcctgccccgatccgtatgctctctgagaatcttgctgatcccaggaggggaaggatgaacctggtgggaaaggcggcggcctctccgcttgggttccacccagcctctgatgacccggcttcgtgatgtcagcggcgaggtggcaggaacaccgagggcagggctccaggccagggctccactggagcccttcagccttccctccctgcccccgtgctttctatggggctgctactgtgctggccctggagagtctttttggctgctagttttggggtgctctgccccctttctgtcttccttactgtggttgaggcctcccgagggggctggctgtggtgtccagcagctctccagaggtggtcaggagctccctaaagtgcatggaattggggcttggggtgtgggagggaccaaggggtaggctgctagcagctgaaggtgtcgtaggtttttactaaagaaccttccactgtctagagacttgagagagggaaagagagagagaggcctagacgaacacaatcacatgttttctttgctgttcctcccgggatgggcctgttttggggtttgggactctgaacccgagcggggttccttcgcttgactttgatcctggtccttaaatgcctttccccactcccctcccgtgggttcaggggccaagcggcccctcctcagagcacgggcagcaccgtctcctggacccctgtgtgccagcctctgcagacgcagctggtgggagggagcatggatttggaggtggagaagtcactcctggtcctcggagggggtgggctgtgtgcctagttcagtgtgactcggggattggtgagggcggacaggtttctgaggcctccctagccttctttgtaaattcacacgagatagtccagggctttccagcgcccagcttggatgataatcctcgtctcccccactctaaggcctccttgagatttctttggggtctaccacgtcctctgcctgtctccaggtggtacaggagatgtggttcctctccctctcctggctccctagaaccccccacttcccctccctgtagctttagctgaccccgtggtggtgggtgtggggtctgtgcgcgtgctcaggtaagcttgggggctccaggtaagcggtcccgtgtcccccccccgggaagcccgcctcctcgccaggcccccaggagttgccgagccccccccatcccgctcggtttggacacccgcaaggccggcatcggtaaatggcacctttttctcttcctctggttgttatttgggggggagcgggctggggcggggcagggtattacggttggttgaggacagccccctaggccagggctgggtgggggaacggggactttttggccttcatgacagccccacgttgatcacaggccagggcctcaggcttgccttctgctacgcgctgcccgagagcagcagtgagcctctcccccgtctcccctctacgactcccctttcctggcaggctcaggctggggtgcgctcccagcacgtgttgagccgggggtgtggagggcgagatggggcagggctggggggaggcagagtcagtcgtctcaggtaaggcagggattttcagtagcaccgcacggctccccatgcttcctccactgcccctctcccctgctgcaggggccccgccaggccccctgggagtgtataacccgcctctctgctccctgccatttcctgaagatttctcccacccccttctggttcattttctgttctgatgtctgttccccccacactcacccccctccaaaaaaaacaaaaacagaaaaaaccggtgtggtctggggtgcggagcgtcccagctgggcctcctgccccggcttggtgtctcagggtgcatgcttggggttgtggaggagccccctcccccacagcagagtccagcgtggagttaaccttcagtttctttgcagcgattttggccgccctggcgggagggggctgttccatcatgtgggagaggaagggccggggagcctagggggtggcgggtgagggtggacgtctcccccgaccaggagtggttggggcgctgagaggaagcagacgctgagatggagcaggcccttcaccggtttgggagagggttggtctggctgtcagttgcctggctgtctgttgggcgtgtgcgtgtgcgtgatgatggggacacggggcggggattctgtagagctgggcctgtcctgactagaggaccctctggggactcctctcccctccccctccccacatctgttacagccgcttacaaacacgcagatggcaagaagattgatggcaggagggtccttgtggacgtggagaggggccgaaccgtgaagggctggaggccccggcggctaggtgagcacatcctgccttcgacgggctctcgggggccctgggcctggtggccttgttctcccttctctgctgctttctgcttctctgtctcctgccggcccacctctcccatcgcgtcctcatctccggcttctctctcttgtggccatcacatttctgacagctgcctgcctcctcgttctgggttactgtgaggagcaggggcaccagcctggagaggcctgagcccacatgctggcgtccgcccttgctagctgggggtccccttttcctgcctcattgtactcctcttagtggaaataaccccgagttcactgagctcagtgtactgggcgcccagcttggcagtgacgcatgctggggttgtaaatgtcactcgctcatctgcttctgctgcttgctgttgctcttgttcactcttttactgattcagcaagtacctattggatcaccagctgtgtgccgggcttctagttgagcaacacagaggcagcctctgccctctgagcctcctgcattcggtctcctcattgtcatttgctgtctcaggcaaggtcagtttggctgcaagtatcagaaataaacttgagcttcctgaaacataaagggccctgttgatgtagaatcatgggcatcctttggagttcggaggtatgtgatgtccgtggacctgagaacct[144 bp omitted]ctactaaaaatacaaaaattaactgggcgtggtggcgggtgcctgtaatcccatctactcgggaggctgaggcagagaattgcttaaacctgggaggcagaggttgcagtgagccaagatagagtcactgcattccatccagcctgggtgccagagcaagactctgtctcaaaaaaaaaaacaaaaaacaaaaaaactggggcgacccacctgtgatgtgtgacagcccacagcttgcttctgcctcgtttgcctccatgcagctaggtcggtcccatgcctctttgcactggcccagcgcagcaggccacaggccccagctttacactcagtcctggatgagtctcttgtttcggggtgggcacatttgattgactcagtgttgggcctggggtcctgttgctcaggcatgcttattgaggactgaatcctgcaaagctgagtgacagttgtcagagaagatgatggtccctgggcagacacccaggcagtagtagccacttggggctcctgtcctgcctcccagccctgtgtcctggctctggactcgcctgtgctagggagaccacgctctcagctgctgagcctcggagcttaccaggcatgttcttaccttactctggtctctctggggtggagtgggttcttatagctctgctgtttcctgttggggcgggaaaatgctagaatctcagtctttccagaatctcagaatcttctagttcaattgccattcaaactttttgttggtgttagccaataacatcttgactcggtgcacccgcagaaatactgtaacctaaagtttgaggaaacagttttttctatgtagtaagtatatagttgtattctgctgttttgtttcttaagatgttggttgcaacccatcagattgatgatgggactcatttctgggtcatgacctgaatataggaaaggctagtctagctgccctgtgcctgtgacatggcaggtgcctggtccgctgcctgcttctataagaatgtctccctgcagcctcttttctatacagaactcagccctgcctcacggaagcttttccaggcagtgcgagatagaggagcgcttgagaaggcaggttttgcagcagacggcagtgacagcccagttctgcaccttctttgctgagtcactgtgggccagtgacttgatctgagattgtttccccatcagaaccatgaggttatcatctgtgccttggggctgttcatctatctattcacttgacacacacacatccacctttctataccagctgcagcgccacctgctggtaccgtgagcaagagctgggcatgcccacggttccggtgccctgcagtctggtgggagaggcaggtaggggtcgactcaggtagcaaacctgaaactccaggggaaggaagcgtttctgcaactgtgagtacataggactgtgaggagagacttcccgagaaaggatgttcgggctagcgttaagggtgagcgtgagttcaccagagaaggaaggggagaccagtccagggcaaggagaatgcacagacactggcaggaaggtgagcgtggggacactgggaaaggcctgggacacgcagccaagagccgcggctcagacgctagcagggcccgctcttgctgcctctaccaccagttgacgaggagtttggaccttaggctgggggacgccagcaaaggcttctaagcagatcacatttttgggtggaaagatcattggcttcgggtttctgtgagggcgaggatgattggaagggagggttttgaggaggctgtgaagtgcgctatggttaagatgatgcgctttggggccagacatgggttccagtaacggctgttgcctagcgaacgctttgtgtgagttaattagagaagacgtggctgtcttgtgatgggagtgcgcgggatgaactgcacggggggacccggccctgtgaacactaagccaggggctgccttcctgccctttgctcttggagtcggctcatttctgctcctccgggccctgtccctgcccagattcaccctctgtccgtctgccctgccccaggaggaggcctcggtggtaccagaagaggaggggctgatgtgaacatccggcattcaggccgcgatgacacctcccgctacgatgagaggtaagattgggcgaccggtgtcctggggtggggggcggtcacggggggagcccagccacacaggtctgcccacctcatccaggcccggcccctccccgcttccgcacagggaccgggaccgggaccgtgagcgggagcgcagagagcggagccgggagcgagacaaggagcgagaacggcgacgctcccgctcccgggaccggcggaggcgctcacggagtcgcgacaaggaggagcggaggcgctccagggagcggagcaaggacaaggaccgggaccggaagcggcgaagcagccggagtcgggagcgggcccggcgggagcgggagcgcaaggaggagctgcgtggcggcggtggcgacatggcggagccctccgaggcgggtgacgcgccccctgatgatgggcctccaggggagctcgggcctgacggccctgacggtccagaggaaaagggccgggatcgtgaccgggagcgacggcggagccaccggagcgagcgcgagcggcgccgggaccgggatcgtgaccgtgaccgtgaccgcgagcacaaacggggggagcggggcagtgagcggggcagggatgaggcccgaggtgggggcggtggccaggacaacgggctggagggtctgggcaacgacagccgagacatgtacatggagtctgagggcggcgacggctacctggctccggagaatgggtatttgatggaggctgcgccggagtgaagaggtcgtcctctccatctgctgtgtttggacgcgttcctgcccagccccttgctgtcatcccctcccccaaccttggccacttgagtttgtcctccaagggtaggtgtctcatttgttctggccccttggatttaaaaataaaattaatttcctgttgatagtgggcacctcggtttcttcctcactgctctgttttccccagaaggttgttcctgacttgatagccctgcttggtttggtttccagggtgtacttaaaacttgagcgttaggacatgaggctggctctgcccagtagccagagctgttgaaagtggggtgaggcggcctctcgggctccttgtctcccttgtgtttttcacccttttttctttttcatctctgccacacattcctcagggctgaccatacccctgtcttggtggggggctgggaattaggagggggcttgattactcaggggaagccgcagttttgaatatgcaagggaagctaccatctgcaagggagagcggcacacagggtgaggaaaggcagaatacactgggcacgggtgagacggggcagagcaggaagggtggacccacatcataataagtagtgacagaggagcaacgagcagaaacacagaagaggttccaccagcaattgagatttcaagcagattcctggacaaaagattaaagacattggtggtgagaacacttcagtctggtgagtgcagggaaggaagcctgtcagccttgcagaaccctagagggccaaggctgcagctccaggagagcaagggtgggaggccagagggagagcggggtacagaacagttggcctccctgttggcactcaggatgcctgggagctgggccgggggtgcctaggcaaacctgcttgtgttcagacctgcttgtgtcttgtagaagcgtctcagcctgaaggcaaacttggcctgataactcagagggtctgtgactgacacgcaggatttcagtctgctttttaatggcttcagtttaaccaacggaggatacccagacatttgaggaaaaacagaccacaagataaatagaaaaactgaccctggaagaaatgacttaggaataaaagaacttcatacctctagttactatatttcatagatatcccagatactgcaactataagacttctagtattggctacaagaagcccattttggactaacatggcacagactggttacataaaggctggacaataggcaaaaacttagaaaaggcgccagaaagtggccagctttgatgaggcttgagggggtgtgatccgttaagagaacacacaggtgtgtttcgcacttacccttgccttttccttgaggatgttttgccatttagcatgaggaagtcaggcgggactgacttccactgggccaagttcacagaggttcagccaggcagctgggacttgacgaaacaggagaggagggcactgacctcccaaatctacgtgcaccctcccttagaggcatctgccaactcaagctgctcactatctgcaagacccccccccccaagaaactcatcagaatgcagtaactgggaggctaaggaactggtggcctggagactgcagcagccatgctgttctaggggagacaggttggggttcaaggcccaccatggattggctctgcttgagatggccagggtgcctcaatgtcagagtaacgccataacagaagaaatcagactaagaggctgggcatggtggctcatgcttgtaatcccagcacttcgggaagcagaggtgggtggattacttgaggtcaggagttcaagactagcctggccaacatggcaaaaccctgtctctaccaaaaatacaaaaattaccctgaggccaggtgcggtggctcatgcctgtaatcccagctctttgggaggctgaggtgggcagaccacctgaggtcaggagtttgagaccatcctggccaacatggcaaaacccaatctctactaaaaaatacaaagcattagccaggcatggtagtgagcacctgtaatcccaggtactcgggaggctgaggcagaattgcttgaacctgggaggtggaggttgcagtgagccgagatggtgccattgcactccagcccgggcaacagagtgagactccatctcaaaaagaataaataaataatcaatcaggctaagaaagcctaaaaccagactttttcaggatttaggcagtctgctagtcagaagaaaactctggaagaagataacgttccgagtctccacatgtactatttttagtacccattactcagcatctactcaatagttaccagccttgctagaaaggacttaatttgctgaaaaccaagagggaaacaaaatagacaatagaaagagacccaggcaggggtgattcagatgttggagttatcataactatgatatattcacaaaataaggaaaagatggagaatgttgagatatctggaatctagctacttgagaggcagaggtaggaggattctttaagccaaggagtttgagattcagtgagctatgatcacaccactgcactccagcctgggtgacaggaagaccctgcctcaaaaaaaaaaaaaaaatctggaatctaacaaaaagttaaatggcaattctagaactagaaaacacaagtgaaattaagaattaagtaggtggtggccaggcatggtggctctgtaaactcaacactttgggaagccaaggtgggaggatcacttgagcccaggagatggagaccagcctgggcaacatcgcaaaagcctggtctctacaaaaaatacaaaaattagccaaacgtggtggcgtgcgcctatggtcccagataggaggctgaggtggaaggattacctgagcccagggaggtaaaggctgcagtgagccatgattgcacaactgctcttcagcctgggcaacaaagtgagaccctgtaacgacaacaacaacaaaacacacacacacacacacacacacacacacatatatatgtatatatagagagagaaatagcatgttacttagacacagaagcagctctcagactaaacatctgtaagttccctctcacagtgagtagagttaggagaggtagaggctggtgcttttcactattattagcctgtctgtgttatttgattttgtttttaatcccataaagacattactttttgctaaagagagagctacagtgaaggagacagccagacaaacctgctctagtcctcccacttggaacaagcacttttctggactccatatcgccacccagcagaaccagaagagcagccaactttctccaaagtcttgtccacatctcctcggcctctctagagcatgataccactgaccacttcctttttttattttttatttatttatttaattttccaagatggagtttcgctcttatttcccaggctggagtgtaatggcacgatctcggctcactacaacctccacctcctgggttcaagctattctcctgcctcagcctcccaaatagctgggattacaggcacccgccaccacgcccagctaattttttgtatttttaggagagatggggtttcatgaagttggccaggctggtctcaaactcctgacctcaggtgatccgcccgcctcagcctcccaaaatgcttacaggcgtgaccaccacacctggcctcactttttttgtttgtttgtttgtttgagacggagtttcgctgtttttcccaaagctggaatgcaatggcatgatctccgctcaccgcaacctccgcctcttgggttcaagcagttctcctgcctcagcctccccagtagttgggattacaggcatgcaccaccatgcctggctacttttgtatttttagtacagacagggtttctccatgtggtcaggctggtctcctgacctcaggcgatccacccgcctcggccccccaaagtgctgggattccaggcgtgagccaccatgcccagccacacttctttttaaaaacactcgcagccagacacagcggttcgtgcctgtaaactcagcactttgggaggccaaggcagggggattgtttgagcccaggagttcaagaccagcctgagcaacaaagacccctccatctaaaacaaacaaaaaaagaagataaaatttaaaaacccctcttctcatggtttctcccacctgggtttctgcctacatttcaggccattctctgctgtcctcctgacttttaagtgttagagaggtctggggaccagttctaggccgtcttaatattcgcttgcccctgacattcttatccactccggtggttttatttaccacctatgccccaatattcaaacatgcctgcagaccaggttgctcttttgagccctagacctagatcgatagtttctccccatggattctgcataggctcctcaaattcaaaatatccagtatcggccaggcaaggtggctcgcgcctgtaatcccagcactttgggaggctgaggcaggtggatcacttgaggtcaggagttcgagaccagcctggccatcatggtgaaaccccatctctatgaaaaatacaaaaatttggcaggtgtggaggtgcacacctgtactctcagctactcaggaggctgaggcaggagaattgcttgcacccgggaggcagaggttgcaatgagccgagatcacgccactgcactcgagactgggcaacagagggaagactgtgtctcaaaaacaaaatatccagtatccctctttcagtgtagaccatcttaaaaatggcaccaaagcaccttaatactgtcttctcctgcacctcccaatccccttatatagccaagcaccaaggcttgtctagacatttcccacatctgcccacccatcttctgtgctttggccctggtgctagctgccacctggatggctgtggtagcctcgtaagttgccccgctgcttctcctcttgttcttgtccaaaccagtctccacagtggctacagtgattttttttttttcaatagatacgaggtctcactatattgcctatgctggtcttgaactcctgggctcaagtagtcttgctgcagcctcccaaagcgctaggattacaggtgtgagccaccgtgcccggccccagtgatcttaaaatacaaatttgaggcccaacctgggcgacagagcgaggctccgtctcaaaaataataataataataatataataataatacaaatttgagtgtcatatttttctcttaggagtttgcatgaagccccaaatcctcaaggcgcatatgccaacgcaggagcccaggcataaactatcctgccgaccttttcacctcatcatcaaccaatcctaactctgcttccagccacgtgggctctttctgggtggtgggggtgacccaagctccacctcttgttcatcttacctcccaggactgtatgtcaatgtccctcctctaggatttccttcgttttctagatcatcacctccccactctcagctctcatcacagccgtagttggtcgtctacctcccctatagactggaagcttcgttcgggccgtgggcttggctgtcctgctcaccacggtgtccatgacttgggctcagatgtttcacaagagtttgttgaatgaatgtggggaaaggatggacaggggatagacgggtgtggagggcaggcagacacggatcctgaaaggtacacacagaccgaacctgcagtgggaggggtcgccaacaggaccgactggccggggcggagggcagggcgcggctggcgcgcggcaggtggtcggagcagtcgggcgagggagagctgggcgctctccaggctgcgcctccgcagggggcgcccgtggcccggggcgtggcctcgcgcagccccgccctcctcgccggcgccagggcaggcgggcggctggcagctgtggcgccgacatggctgcgctggtggagccgctggggctggagcggggtaagcgtgcgccagggggccctgcccacccgggccgcggcctacatacccagcccccggtccccgcccttcccgggtcaggccagtgcgggtgggccagcggacccggagggggtgggcggggcgggcgccggggccgggcggtcgctaggtgtgggaggctccctgggcgcgggccgggacgctgggcgcccgccttacaacccggcctgtggaggggtcccggggccgcagggccgctggtggcagtctctcctgcgccaccctggactctgcggggtgtccgactaggcttcggccgtcctccccggactgtgcgctcggcctcactccgccgctctccttgcttctctgcgtctcggggtctctgacactcggggtttctgcgccccgcccccgccccgcagacgtgtcccgggcggttgagctcctcgagcggctccagcgcagcggggagctgccgccgcagaagctgcaggccctccagcgagttctgcagagccgcttctgctccgctatccgagaggtgaggggcgcgcggcgcaggggcgcgagctggtggccgtcgtcctcctcctcctcctcctgcttgtcccgagcccggagactacgcctcccggcagctcccgaggcggcccgccttggggtgccaacgcttcagctcaggggttcttcgggagttgtagttttctcggccttctgttgcgggggcggggcggatccttgcgtggtagcgggagagggtctagaggcctgaactcctgcgtctagggctggaggagctggcgactccctgatgccgctgcctcctcacccaggtgtatgagcagctttatgacacgctggacatcaccggcagcgccgagatccgagcccatgccacagccaaggtgggccccgcaccccattgctcctggtgtctatttaactgcctagtcgaactcaatatctccttcatgccagtcatttctgtttcctccctcatgatttttgctaaatctatgtgccaccttactattagtaaataatcgcacatttttaacttaaatgtcatactaaggcatctttagcaactgcaaatggaaacagtatggcatggttggtagaagataaccttcaacatctgtacagtgcaaaccaggaaactcatggcgctctgacctctcactgcacaatagttagatgctgctacctcttgctgctgtccggaggctcagatctccctccaggcctggctttcctctgtttaaaagtaagattgaggccaggcacggtggctcacgcctgtaatcccaacactttgggaggccgaggcaggtggatcagttgaggtcaggagttcgagaccagcctggccaacatggtgaaaccccgtctccacagaaatacaaaaaaaaaaaaaaagaaagaaaaagccgagcgtggtggcgagtgcctgtaatcccagctggattacaactccggaggctgagacaggagaatcgcttgaacccaggaggccgaggttgcagtgagccgagatcatgccattgcactccagcctgggcaacagagtgagacttcatctcaaaaaaaaaaaaaaagtaagattggcaagtatggggtattcaagacacacaccaaatggacactttctcttgcaagtgaacagaaagagacgcacagtcattacagggggatcgtgcattgtgccatgacaagtgtcccatgcttggggatagtaacccaggctaaatcgctgtcctcggtccacatcccccaccccagctttcatgcctacctggaaggggccctcatcttcagtcgctttctctctcccaggccacagtggctgccttcacagccagcgagggccacgcacatcccagggtagtggagctacccaagacggatgagggcctaggcttcaacatcatgggtggcaaagagcaaaactcgcccatctacatctcccgggtcatcccagggggtgtggctgaccgccatggaggcctcaagcgtggggatcaactgttgtcggtgaacggtgtggtgagtggagggctgaggcaggactgggggacacagtctgtctaacgtagcatagcccctgcttttgacattcactcaacacacactgagtgttgtctgtatggctagccctgtgctgggcaatgttacagactctgagagatgttggcctcagctccctacactcaaccttctctctctggggagggcagtaggccccggctgaaatagtcctaatccagagacataataatgaggaagtgcaaagtattgtgacagcccagatgtggcaccaggccagcatagatacaggaaggttttgcagagtaaggaacatttgggttgggtgttaaaggatgagtaggagttctccaggcaaacaaggtacagggtgttcctgctgagggtactgtagataaggatactgacttggcatacctctgagctgaaaagaaagggcttagttctgatggaggtctggggcatgcaggtaattaaaatcactgtggttaggctgggtgcggtggctcacacctgtaatcccagcactttgggaggctgaggcacgtggatcacttgaggtcaggagttcaagaccagcctggccaacatggtgaaatcccatctctactaaaaatacaaaaattagccaggtgtggtggcaggcacctgtaatcccagctacttgggagggtgaggcaggagaatcgcttgaacctgggaggcagaggttgcagtgagctgagatagcaccactgcactccagcgtgggtgacagagtgagactccctctcaaaaaaaaaaaaaaaaaacaaaactcactgtggttagagttgagggaagcataactggagagatggctggggtcagccatacaggacctgagtgccagcctgagaagctgggactttgtcccatgggtgctggggagctatgggaggggtgagccagggataaactcagcttgcaggtgcagaaggaccactctgggactctatgggagatgaactgaggggagagattagaagccaggccagggaggaggctggggtaagagtccagagaaaagaggacaaggcctgagctggcccagggctgtggggacaaaaaagagggagtcaaggcgggcggacattagtgggctgtgggcagggaggccacaaagatgggtctggacgtttggccagggactgagggaacacggggctgtccctgacatgggaatcctgggaggttttggaggaggacactgaaccaggagttaatgactcccacgaggaggacatgaggcattgacatctcagggctggcaccaggctcactagcagtgggtcccatctcccagtgggggctggacgagggcagcgggccccaggctcagctgtctgtgttgggccctgcagagcgttgagggtgagcagcatgagaaggcggtggagctgctgaaggcggcccagggctcggtgaagctggttgtccgttacacaccgcgagtgctggaggagatggaggcccggttcgagaagatgcgctctgcccgccggcgccaacagcatcagagctactcgtgagcccctgggtcaccacacccctggggcctccacgggctccctttaaccccaggctcccaaaccaggccagtgcttcctggatcttccagccctggcccctcctctgggatcctgacccttgacccttggcccaggctctcaccccaggctagtttggccaaatcccctggggagcccttagcttccttccatcccaagatacggaacctactgtggctgggatccctcagcccacttacctgggcccttgcctctgcaaccccagtcctgcccctcttgtctacccggagcctccctgatcccgggtcccttgtccaccccccttgcaggtccttggagtctcgaggttgaaaccacagatctggacgttcacgtgcactctcttcctgtacagtatttattgttcctggcactttatttaaagatatttgaccctcactgagtgtctgtgtgtctgtcctgcatccctgggttggtgtcttgagatgtggagggaatgcgaggagctgaggtcaggccaagccgttgagaagccttttccagagtctgagaacagaggttaagacctctccctaggtctgaaggcggagacaggccggcttccaagagactagtccgagggcggagggcggaggcagggacccagtctgggtctgagtgctggggcagaactgaggacaacgctgcctacccttaagagcgtctgagggcgaaggccaagtcccttcctccagagtcctgaaacgcagccggagccagtgggcggcctctgtgtgggcggggcggagcgaaccattagcctcgtccgccgggggaaccctgcaggccgcactactgtctgcgtgggagtcgcgggtgggggtgccgcgtgcagttcccgaggcgggcgcaggggtgcagaatgaggtgccctcgcccaccgggcgctcactccaccttccaaacacagcgcgtctttccggaagcagcccccgccttgaaatccaacctttagcctcatcccgctgcccgcccagccctcgtgtcccgtgcggcgcgagggctagtgcgcgccactgccgggagccggggtcgcgactcgcgttccacgccgcgcgctactcgctccaggtgacatcatccccctgccgggctccgcctcccgccccagccgcctcacgccgcgtgcctattggtcgacgcgccttatgccccgcctctcgctctccgcccgcgcgacccctcccggccggtgtggaggcggggtctagtcgccggccggcgccgacgctctctcccattggccgctcttcgccgtctgtcagtctcctgttaaaggggccacgaccgcccgggagccgtggggggggagggggagggaggaggaatttttttggggggaaggtgggatttggggggcgctggtgggcacccctggatctggcggctgcggcctcgcggggggaggctgatcggtgacaggggcagggggctattttgggggtagaaggcagtgagagcgtgagggggaggggggtccccagcgcccaagccggagccagagacgcggagcccgcgcgagcgtcggagacagggctccagggctccgaagcgacagagccgggccccggccgctgccaggggccccgcccggcccccccactccaccccacgtccctcctgcagcccagctccgcccgcagccgccgcggaccaggcaggtaagagcccggcccggccctcctggcagcgcccaccctggggaccccttggcgagcctcccccgcctccccgagatcccggattcccttcctcatcccaggggacccccgagcccagatttcacaccccaaccccggggactcaggcgtgcccctcccggcgcccagagtccccgaccgaaccctagaatcccgggcgcaccgccgcctcgcgcctcctccagggcccaggagcttggatttcccggtccggccccgggacccctcctagagcctagatcccccttcctgaccctgtcctgggagctccagacacccgccgcggcggtgccagactccccagacgcgtccgcatcgtccccgcttcgcgcactccgtctcccgtcgccagcctcgggcttgcacagccggctgcgtcccacggtccaggcaggctcggcggccgccctggacacaggcccgctctggagctgtccatggtcagcgcgctcggcagcctcgcctccccccacctcctgccgccgccaccagggagggggcgcaggcggcgcggggatccccccgccgcgcctttgacccgggaatacccgggccctccccgaccagggcgccccagcctctgggttctgccggccaggctcgtggccccgtcctcggcaccccaggttcctgggactccagctgctccctgaggatccagggcttctgaattttcctattctggtcgccgtggggaccatggcacccggggatgcagctcccaccccgttcgggaagcctgtccgtgtctacacctctgctggccccaggtggtagccctcaccccgtcagcacctaggaatcctgttccccagcgtttgctctgcttagaaccccgctgtgccctgcagacacacagacttagcctcctggcacccagcatctgctccccgagggactcaggcgccatgactcctttcctttgggggacccggaatgtgattctcaatgcagttctctgacttctgttcacactcccacttggggacctaaatgtcttggtcccagtctcctatcccctcagggacccaggagttcagaccccagcttccgtactgcccaccagcttttactgaggctgtctgcctcaaccctctctccaaacaagacctcaggctctcaccttccaatcccccatcatttacctccacaaggattcaggagtccaggctcccagctctgtccactgccctccccagcaggtatctagtttctcaggtctcacttttaggaaccaggtcttcacagcctcatcactctgccccatcaacttcacatctcctgtggccctaccaaacccctgtctcatcctcatgtcaccccaggtggcgggcttcaggactctctactctttcccctaagatgcagcttgttgagatgtttctagcactccattgccccctgaggctcagatgagttccccttctccaagtacactctcccaggccaatgagccgaacacacatcacctcctccagatgtattctgtggcctgggctcataaggagatctagaagctacctgctgccatacaaatttctttctttctatttatttatttatttattttgagacaaggtctctgttgcccaggctggagtgcactggcacaatcacagctcactgcagcctccacctcctaggctcaggtcatcttcccaccttagccgcctgagtagctgggaccacaagcactcaccaccaggcctggctaattaaaaaaaaatttttttggccaggcgcggtggctcatgccggtaatcccagcactttgggaggctgaagcgggcggatcacctgaggtcaggattttgagaccagcctggccaacatggagaaaccctgtctctactaaaaatacaaaattagccaggcgtggtggcacatgcctgtaatcccagctactcaggaggctgaggcaggagagtcgtttgaaccccggaggcggaggttgcattgagctgagatcgtgccactgcactccagcctgaacgacaagagcgaaactctgtctcaaaaaaaaattttatttatttatttatttatttattttttgtagagatgggggtttcgccatgttgcccagactggtctgaaactcctaggctcaagggatccttctctgttggctcccaaaagtgctgggattacaggcatggccatcgcgcctggccgggccacatttcttgtcgcacatgtgctcttgcattgctccatgttctagattccttctaaacaccagaacactcccagctgatgtctgttctgtgttccattttcattccaggcatggtctgagttctaggccagatgccaatttttttttttttttttttgagacggagtttcactcttgttgctcaggctggagtgcaatgctgcgatcttggctcaccacaacctctgcctcccgcgttcaagcgattctcctgcctcagcctcctgagtagctgggattacaggcgcctaccaccatgcccggctaattttttgtatttttagtagagatgggggtttctccatgttggtcagactagtctcgagttcccgacctcaggtgatcacctgcctcggcctcccaaagtgctgggattataggcgtgagccactgtgcacagcctttgtttttttcatatatttagataagacccctgagccagattctgatcccaccatatcctcagacatgttccaaagttctaacaacaagtccttccttctttgctaaatgttcatttcaagtgtgttccaggtttcagccacgttgttctagattccattctcttcccaggagcaatctaacttctaagatgtgtgtgttccaagtatgtgctctaggcttcctaattcgtgccattgattctagaatgcccttccctgtttccctgttttaggttctaaggaagttctatctaattgcacattcttttttgttgttgttgttgtttagttgttttttttttttttttttttggcgggggatggagtctcactctgtctcccaggctggagtgcagtggcgcaatctcagctcactgcaagctccgccttctgggttcacaccattttcctgcctcagcctcccaagtagctgggacaacaggcgcccaccaccacgcccggctaatattttgtatttttggtagagacggggtatcaccgtgttagccaggatggtctctatctgttaacctcgtgatccacctgcctctgcctcccaaagtgttgggattacaggcaggagccaccacgcccggcctgttgtttagtttttattttatttttgagacggagtctcactctgtcacccaggctggagtgcagtggtatgatctcagctcactgcaacctctgcctcccgggttcaaacaattctcctgcctcagcctcccaaatagctgggactacaggcacatgccaccacgcctggctaattttttttgtatttttaatagagacagggttttgccatgttggccaggctggtctcgaactcctgacctcaagtgatccccctcctgcctcccaaagtgctgggattacaggtgtgagccaccacgcccggcctgttatcgttgtttagacattggatctcattatgttactgaggcgatcctctcaccttggccttccaaagtgctggaattacaagcatgagccactgtgcctggccctaatttcacattcttttttttttgagatcgagtctcactctgttgcccaggccagagtgcagtgacgcaatcccggctcactgcaacctccgcctcccgtgttcaagcaaattctcctgcctcagcccctcgaggagctgggattacaggtgtgtaccaccatgcctggctaatttttgtgtttttagtagagatggggtttcaccatgttggctaggctggtctcgaaatcctgacctcaaatgatcccccgggctcagcctcccaaaatgctgggattacaggcgtgaaccaccgcacctggcctcatgttcttaaatgtaaaagattcccagtgaagtgttctacataatgttttccttcccccggttctaggttctaggcccattcattttctgtcattttttccccagtgcagccttagtttagaacttgtcccctggtggatcgtgggttttctcctccatctgccactttggcattctaagcttgttctaggctctctcttcttctggagccttcagcctagaaatgtccttatttccagaacagcccccctcctttgccagcctcagtctttattccaggaaatgctcaattctcaacatgcatccttttgatccctccccctccccgccctatagacacttgtaagttccaagcaaactcttagacacatgataaaaccaaggatgtgactcctgctatattcttttttaaaaatgtaattaaatttttaaaaaatctatttatttatttattttgagaccaggttatgagactggttaatttttgtatttttttgtagagacagggtttcaccatgtttcccaggctggtctcaaacccctgggctcgagtgatcctcccaccttggcctcccatagtgctgggattacaggcatgagccaccgcgcctggccccctgctatattctgtgttataccttcatccctagcaggctctgagttctagattttatctgctgactatgtttgttatgtgttgcattaggtatattaatgggtgtcattatgtatgtggggttctggggtgacctggacactaagttattgggttgctcttggctggttctagattataggcttcagaacttagttctagattacttaggcctatgagcggttcttaccccaagccattgaaagcgtggaagcatacgtctattccccaccctgtactgtgtgtagtaaccttctaggttctatgtccagccttgctgtgttttttatttccttctcggtcaatttaaggctctggaacaggctccccaaaacatctgtgttgcatcgtcagagtgggttgctg[146 bp omitted]aaaataattagccgggcgtggcggcacgagcctgtagtcgcagttacttgggaagctgaggcaggagaatcgcttgaacccgggaggcagaggttgcagtgagccgagatcacgccagcgcactccagcctgggcgatagagtgagactccgtctcaaaaaaaaaaaatagagatcatgttggttttttgcctatggctggcttgccctcttagaatcgttttcctgaatctttcctctgagtgctgggattcgcctgcctagattctcagatgcaccacttcaaacacccaaggggacaggaacccagctgcctcctctcccagggcccacggccctcaggccctcctctcctcacagaagtccaaggccccattcccaggctttggacacagtccgcatattgggcggggctgggaattatccacgctcagaccggttatgcgttgcccgcagggagagaaggaaaagaaggaactgagtgaaagtccctcctgctttccgccgggccagctggacccgtcggacctgatgtgtgtggagggagcggttcagggggcctggcttcatctccgccctgcccctggctctagggacccaagtccaggcttcccgccccagaaaccccgccccttccttgtcccccgcccttgggtatagcttcaagagggctggggctggggttggtgggagcgtcccagaactcctgggtcctggaggaggagctgtgcacccaggggcctgggggaggaggagcctgaagcctgggacttctgggtctaagcgaggaagctgagagcccagactgttgtctcttaggggaggagaggggtgcggtctccgactcctgggaatggggaggtgggggctggaggcgcaggctcctggggtctgagagacgaaagggactgggtcttagactcctgtgacctgagggaggcgggagctagttcttggacttctgggtcgtgaagagggtgaagaagtgacaagcatggtcctggccatactggtattttttttgtttttttttgtttgtttgtttgttttgtttttttttgagactgggtctctctatatcgccaagctggagtgcagtggcacgatcttggctcaccgcaacctctgcctcccgggttcaagcgattctcctgcctcagcctcccgagtagctgggactacaggtgcgtgccaccacgcaagctaatttttgtatttttagtagagatggggtttcaccatgttggccaggctgggctcaatctcttgacctcgtgatccaacagcctcagcctcccaaagtgctgggattacatgagtgggccaccttgcccggccgttactgtgttttttttttgaaatggaatctcacactgttgcccaggctggagttcagtggtgctatctcggctcactctaacctccacctcccgggttcaagcgattcttgtgcctcagcctccccagtggctgggactacaggtgcatgccaccatgcccggctaattttttttgtatttttagtagagacgggggtcac[131 bp omitted]cttttcccgaatggagtaggtctttagattcttagggagccggggtccagatttctgggaaattgaaggaggcaggagttgggctggctagtaggtgagaccaaccctgtgacattatacaggtaaccacatcctagtgacctaatcctgggtcccttggccctgtggccttcttaaggcatggttctggtctgggcctcagttttcctacccatgcagtgggttgagggggattctcagtagagccagaataggtagacactgattttctccacattcactcatacgataccagggtcggccagctttggttcctttgagtgggctaggcttaggtttgctgccactgtctgttggagtctgacctcagttttcccaaatcctctcacccaggtagccaggactgttttcctaagagcaatggcacaggcacagtggcatactttgggatgctgaggcaggaggatcccttgagtccaggagtgagacctca[134 bp omitted]cttgtctctactaaaaatacaaaaattagctgggcatggtggcgggttcctgtaatcccagctactcgggaggctgagggaggagaattgcttgaaccgggacccgggaggtggaggctgcagtgagccgagatcgcatcactgcactccagcctgggtgacagatcactccagctaaaaaaaaaaaaaaaaaaaaaaaagaaagtagggaaaggaaaagaaaagaaaagaaaagaaaaaaattagccaggtatgctggtgtgtgcctgtagtcgcagctactcaggaggctgagttgggaggactgctcgagtctgggtcgttcaggctgcagtgggccgtgatcgcgccactgaactccagcctgggtgacagagtgagaccctgttaaaaaaaaataataataataataggcctcagtttcccctggcagcacctggtggccaatctttggtttccccggtggagtgacagggtggcggtgcctgtttccctgtgtcatgatcacagtgcctgggcctcagtttcttctgtgcagtgcttggtttgcccccaactatttcccctacgtggtatccgagtggctgtgcctcagtttctctgttgtgccttgacaaggccggtctgttccttgccctccccgccccgcaggcccgcaccgccgccatgatgtgcgaggtgatgcccaccatcagcgaggatggccggcggggctcggcgctgggcccggacgaggcgggcggggagctggagcgcctcatggtcacgatgctcacggagcgcgagcgcctgctggagacgctgcgcgaggcacaggacgggttggctacagcgcagctgcggctgcgcgagctcggccacgagaaggactcgctgcagcgccagctcagcatcgcgctgccccaggtctgggcgggacaggggcggggcatgagggggcggggcctcggggggaagaaggcggtccggaaggggccgggcttggcgcctggaagggaggagtctgggcgaggcttgccgttaatgggcggggcctgagtggcaagggacagcgggacttagcagggagggcgggaccttcaaacttccagtcccagtgaatgaaggagacagggaaaggattgagccgaatgtccagatcctgccaatgtctggacaggagtttgcagctctgacgaaggagctgaacttatgtcgggagcagctgctggagagggaggaagagattgcagagctgaaggcggaacggaacaacacgcgggtgaggggtgttgagggcggggcctaagtgggggcggggcctcgtggtgttgaagtggggggcggggcctctcagtgttgcagcgtgacctatttttttcccccatctcgcctttctgtcttctcctcttccctgctcccacttcctggctggtctcccactctggtgccactccttcctccctgtctccataacttttctcttttctgtaccaccggttccttgaccccgacctcctctcttttcctgacctgtctcggtgctcctttatatggctccatcttttcctccatgtgtccgccctacctgtcaccctttttctcacatctgccccttttcccttgcctcttttccttgaccccatgccgtgtgcttgcagctgctcctggaacacctggagtgcctggtgtccaggcacgagaggtcactgcgcatgaccgtggtgaagcgccaggcccagtccccgggtggggtctcctcggaggtagaagtgctcaaagctctaaagtctctcttcgagcaccacaaggccctggatgagaaggtatgagaattagaagagcaggggtggagaatggaaacctatagttgactggggctgttctgagtgggagagattctggccgtgattggttggggatgttctgagttggaagaatgttgactgtgattgattgggacaggatacatagactgggacctgactggttgatagcagaaaaataaaccaggatgggggctaacagtggatggggcagattggatagctggttgcggctgcatacccgttatggagacaggagccccaacgctgccctatcggatccgtcccaggggtgttctggaccaggggcaactgtcctaaactggatcttgtctccagctgactgttgccctgccccgatccccaggtccgggagcggctgcggatggcgctggagcgcgtggcagtgctcgaggaggagctggaactgagcaatcaggaggtgtgggtgtggccaagacagggaatttgaatccaaggggaggggctaaggggctgcccacggggcggagccggttgggtgggttccagagagaatctattggggcaggactagggcagacaagctatggggttggactatggagagaaaccagtggggttcctaagtgggcacgcattgcgcagggctacggggagaatctcccagtgagagtgagattaagggtagaaccaggggctggggctcaggctgggactaaggaggaagtgattgaatggggaaaagcggggctaaagcggaaactttgtccaggaggctaaggggaagagtaagggtagacgccctccgtggtggcagctaaggagggatataaggagggagggagcctaagggtaaaccgtggggtaggcatggccccagcacgaccggaggcatctcatatggggccgcctatccccttagagggccaatgccagtgagaactagagctgggggttcagggagcccctgtgctctgattcccctttcacacttccagactctgaaccttcgagaacagctgtctaggcggcggtcagggctggaagagccgggcaaggatggggatgggcaggtgagacatggaagtcccctctccgtgagctccattcaactccctgactttgtgatagtgtttgtaacgtttggtatcatcctcactggccctaagacggctgcacctgtaagagtgtcacagagcttggacctctgattcaggtcacctagcgaacttctgtgacctccttcactgacccccgtggactctgaccagcatgatccttattgatctttgatctactttcagctgattgactttctccttggatttcctctgtgtctccggagacactctgggatcttgtcccctccttccctcactccagactcttgccaatggcctgggtcctggcggggattccaaccggcgcacagcagagctggaggaggccctggagcggcagcgcgccgaggtgtgccagctgcgggagcgcctggcggtgctgtgccgtcagatgagccagctggaggaggagttgggcaccgcgcaccgtgagctgggcaaggcagaggaagccaactccaagctgcagcgcgacctcaaggaggtgaggcccccagggaggcgggctgccctgggtccctcgcctttccgtagagctctccctcgcgcattgctcatgaatggcggaacctcgattcagtccacaggctgggtgactcctctttgagattcagttttcccacctgtgaaaggaaatgtatgattctcatcagagggtgagcctgtggcgcagagtaggcgctccataactgctcgtaattactttgttacctaactttgggttcttctctggtgcctctaaatggattttttttttcttttgtgaggcagagtctggctgtgtcgcccaggctggagtgcagtggcgtgatcttggcttactgccacctctgcctcccgggttcaagagattctcctgcctcagcctcccaagtagctagaactacaggcacctgccaccatgcaccgctaatttttttttttttttttgtatttttagtagagatggggtttcactatgttggccaggctagtcttgaactcttgatccgcccacctcggcctcccaaagtgttgggattacagtagtgagccaccgcacccagcctctttttttttttttttttttttgagatggagtctagctgtgtcgcccaggctggagtgcagtgtcgggatcttggctcactgcaacctctgcctcccaggttcaagcgattctcctgcctcagcctccctagtagctgggactacaggtgtgcaccaccacacctggctaatttttttttttttttttttttgtatcttcagtagaaatggggtttcactatattggccaggctggtctcgaactcctgacctcaagtgatcagctcgcctcggcccaaagtgctgggattacaggtgtgagccactgcgtccagcctctaaatggaatgttttgtgggtatttcacccctttctggcttaggccgctttatcctaatcccagtgaccccagggagctgctgggaaatgtggacctggattcttgaaggcagtggatgagaaagaagagtgagcactaggactagcctgggcaacatagcgagaccccgtcactacttaaaaaaaaaattagccgggcgtggtggtgggt[140 bp omitted]cccgtctccactaaaaatacaaaaaattagccgggcgtg[135 bp omitted]caaaaaaaaaaaaaaaaaaaaagttgaggcataagaatcacttgagcttgggaggtggaagttgcagtaagccgagatccgtaccactgcactccagccagagtgctggttgctcatgcctgtaatcccagcactttgggagaccaaggcaggcacatcacctgaggtcaggagttcaagactagcctggccaacatcgtgaaacccccgtctctactgaaaatacaaaaattagccaggcatggcagcgggtgcctgtaatcccagctacttgagaggttgaggcaggagaatcgtttgaacccaggaggtggaggttgcagtgagccgagatcgcaccactgcactctagcctgggtgacggagcaagactctctctctcaaaaaaaaaaaaaaaaaaaaaaaaaaaaaagaaagagagagagagaaccttcatctgggattttaagcctggatagccgcaggggctattgggaaatgtagccccaccacgtgggctaccagatgagggtccatctcccataagaagttgaagcacttcttttggggttctaggcctctggtaccctggtagctcttgagaggtgttgccttctaggtagaagggatccttatttcccatgagaccccaggacacttgctgtttgattctaagtctgctctatgccagaaattagtgagaaatccaaggcctgggttttgaggagagggctggagtggagacttcacatcccacaggcctcagatcctctgaacctggaggatctgagcctgcagtgtcctagaagctcatgggaggtgtagcatcaccattttaactcgcaggtaggtggcagggacttaagatgggctagtcctgggagctcttagcgggtgtgacaccaccattctgactcccatgtcagggcactttgtttcccagggaacaagggggttccccgtcctctcccccaggggctcgcagtccacggggccctttgctacctccgcaggcgctggcgcagcgggaagatatggaggagcggattacaacactggagaagcgctacctgagcgcccagcgggaggccacgtctctgcacgacgccaacgacaaactggagaacgagttagctagcaaggagtcgttgtatcggcaggtgggggcgcggccgggaggggcgatgggggcggtgccggggcccaagtgacccagcccgtcccctccccctgcctctccctcccccagagtgaagagaagagccgtcagctggccgagtggttggacgacgccaagcagaagctgcagcagacgctgcagaaagcggagaccttgcccgagatagaggcgcagctggcgcagcgcgtggcggcgctcaacaaggtgcggggaggactcgggtcggggccttgcgtggggaaggggtggggcctagaggaggcggggccgtgaatctggaggggtaggagcgaggtcagaaccccggatttgggggaaagggtggggcctaggggctgggaaagggacaggacttggaatggggagggcctggaggtttgcgcgggggacggatgggagcggggttctctagcctggactgaaaggaccggtggcctggaacctgagagggaaggaacaggtcctgaaaaagtggactaggcgcaggggcggggcctgactcaaaggtgcaggggaggagcctggcgctgtgggggcggagcctggcgctcagccttggaggaggtggggctgggagcctgactgatcctggaagggtaagtcacacgccatgggttccatctcctaggccgaggaacgtcatgggaattttgaggagcggcttcggcagctggaggcccagctggaagagaagaatcaagagctgcagcgggtgagggggcggaagactgcacagagggtggggcttcgaggctggggcggagcttaataaggaggctgggctgggcccgggggtggggcttagaggaagggccgtggtctgggcagggtgggcttaacaacccgccccgctctgctttgcgcaggcccggcagcgggagaagatgaacgatgaccacaataagcggctgtccgagacggtggacaagctgctgagcgagtccaacgagcgcttacagcttcacctcaaggagcgcatgggggcgctggaggagaaggtgcgccccccatacaggactgcgggacgcggaattccgggactacctcttgctggaatcctggggccccaggcctttccctcagatctgttatcggaggcctccctaaaccccggcatcctgagttgggcagccttctctgctctattgcccagaccgctttttcacctattctagacgttccaagagccgaattctggggcacccatgcctcgagtccttgacttttcccaaagcctccaaccccatgggtctccaaaccctgaaccctctgagattgcacaggacgtcgcatcccggggcttctctccccagaaacatcgttgcccctgctcccccgaaactcaccacttgtgtccatctcattcctcctgggtcccctcaggcctgtctgtgtgcactgggagctgcctgcagccccacgggcgtggcccctcaggcctcactccctcacttcacctctgtctccacagaactccctgagcgaggagatagccaacatgaagaagcttcaggatgagttgctgctaaacaaggtagggggccctgaggggacaggaggaggatgttggggcagtggttgctgaggctagggtctgcaagtctggcaggggctgttcctcctgggcggagcagattctaacccgacacctccaacaccggcccccaggagcagctcttggccgaaatggagcggatgcagatggagatcgaccagctgcgggggaggccaccatcctcctactccaggtgacagcagcccttctgccctgcccccaccatggagccccgttggccaagcgccaagctcctcccttctgatccccacttcctgtcctcctgagacttctgacccctctgtttttgttttttgtttgtttgtttgtttgttttgagacagagtctcactctgtcgcccaggctggaatgcagtggcacgattccggctcactgcaacctccacctcctgagttcaagcgattctcgtgcctcagcctcccaagtagctgggactacaggcgtgcaccaccacagccggctaatttttgtagttttagtagacacggggttttg[131 bp omitted]atttattttttctttcttttgagacagagtctcactctgctgcctgggctagagtgcagtggcatgatctcagctcactgcaacctccgcctccccggttcaagtgattctcctgcctcagcctctagagtggcagggattacaggagcccaccaccacatccagctaattttttttatttttagtagagacagggcttcaccaggttggcctggtctcaaactcctgacctcaagttatctgcccacctcagcctcccaaagtgctgggattgcaggcttgagccaccaggcctggccccttgaccttgacttcaggacccctggccctaggtctgtctctgtgacccttacctctgtgctcttttcctgaccccttggtctctgactgctttcctcatgcccacaggtctctccctggcagtgccctggagctccgttactctcaggcacccactttaccttctggtgcccacctggatccctatgtggctggcagtggtcgggcaggcaagaggggccgctggtcaggggtcaaggaggagccctccaaggtcagcagctgcctctgggtcctggactgagcagggcttgggcgggcagctgtaggaagtggaactaaatctgtggggctccgggaggaagctgggttgagaggcaggatctcttggactcatccactcaccctttcttctctccttccctgcaaccctcttgcctggatgtctcctcctgtggatgtcctgccacctggtgagaacctgagagtaatcatgggacagggaggggtgtgtagaatcccagagtaggtggggttaggtgaggaacaggagccagctgagtcatgggaatcaggggcgggggtggagtcatgggtgtgggcgtggcttggagaggatttggggagggatcaagaacagggacctgtcaagagaggaagttggaggccgggcagggtggcccatgcctgtaatcccaacacttgctggcgccgaggcaggcagatcacttgaggtcaggagttcgacagcagccttgccaaaatggcatcgctactaaaaatgcaaaaattagccgggcgtggtagcgggcgcctgtaatcccagctactcaggagactgaggcagaagaatcgttcgaacctgggaggcgtaacccgagattgcgccactgcactccagcctgggcgacagaatgagactctgtctcaagaaaaaataaataaaataaaaaaaataaagctgggctgggaaaagcatcagtgaggtcgggcaagtcaggatcatgagccaagacccagcgccaacctcggcccccagccacctaatgtccctctgtccccacacagggataggattgggagcggtctgcccctgcgggctccataccacccccattccctggggaactggacggctccgatgaggaggaggcagaggggatgtttggggccgagctgctgtcccccagtgggcaggctgacgtgcagacgctggccatcatgcttcaggagcagctggaggccatcaacaaggagatcaagtgagccctggccccgccccggcctgccctgccctgccggagctgactccacagcccttctggctctggaggcctgaaagcctgagtccgtctcctcttacaccatccacaaggaattcttccagcccaacactcactccgctgtccaggcatcccctaggatacactcagaagtcttctatgtgctacctacacatataccccccagccagtactcaccattccccaacacaccaaagcctgcatccccaaatagcccagttcctcttgatgcatcaagaatcttccattacgccatcgattttgtggtttcacataaccagtgcccagagtctcccactaccctaggaatctcaagacaacacaaggttcccaacctcaaacaccaag[136 bp omitted]ggctaacatggtgaaaacctgtctctactaaaaatgcaaaaaattagccaggcatggtggcaggcgcccgtagtcccagctactcaggaggctgaggcaggagaatggcatgaacccgggaggcggagcttgcagtgagccgagatagtgccatgcactccagcctgggctacagagcgagactccgtgtcaaaaaaaaaaaaaaaaaaaaaaaaaaaaaagtccccaacttattaagaagcccccagtgatgtaaagtctaccctgattcaccagcaatggccatattcagcaattctcttataatgtactccccatgagccttcggcaaatataccatgaccaccactttccataccaaatgagtccatgcccttcccagatcctagattggcctgagtccctgatctcacaatgctcctattatgaccttgctcttacaggccaccttgaacttgaccttttgtccatagtaatcccttcatgattttccaaaccccttgactatcatcagggccaccctgatacaaaccccaatcaccttgatagccctaatcctgcaatgacttcctgagactctcaggaccccttgactctccttgagcctggaaggccttcagaaacccaccaaagtcctctgacgtcattgcaccgtccccagaattcccattgccccaccaggcctttctggcccattgtgctcccagattccctctcccgctgtctgctgcggcccctcacccagtttcccctatttccctcctcaggctgatccaagaggagaaggagacaacagaacagagggcagaggagctggagagtcgggtgtccagctctggcttggactcgttgggccgctaccgcagcagctgctccctgcccccctccctcaccacctctacccttgccagcccctcccctcccagctctggccactcaacaccccgcctggcaccccctagccctgcccgtgagggcaccgacaaggctgtgagtgctctgaagtctccccagcctagtagggggatggggagaggtcagaggcagggctccccagtgtacagcaacaataacccctcacaccagtggttttccaaagcaacctcagctttccctaaaggttcaaactcaaagggcaaaggggaggctgagtcactgggatcttgaaccctaactttcactttagtcagatctggtctactttt[134 bp omitted]ctggccaacatggtgaaacccccacctctactaaaaatacaaaaattagcctggcctggtggcacgtgcctgtaattccagttactcgggaggctgatgcaggagaatcaattgaacccaagaggcagagtttgcagtgagttgaaattgtgccactgcactccaacctgggagacagagtgaaactgtgtctcaaaaaaaaaaaaagtttctgtgacaacatgcattggagaactacaaattagatcctcagaattgacctttgagggagacaaagagatattggccctattttactcccttaaattcagctttcctgcttccagaacctgtaactcattagctttctttgaggcctgaccaacatggtgaaaccccatctctactaaaaatacaaaattatccgtgtatggtggtgtgggcctgtagtcccagcttcttgggaggctgaggctaaagaatcacttaaacccgggaggcagaggttgcagtgagctgagatcatgccactgcactccagcctggcgacagagctagactctgtctcaaaaaaaaaaaaaaaattacccgggcatggtggcacatgcctttaatctcagctacttgggaggctgaggcaggagaatctcttgaacctgggaggcagaggttgcagtgagccgagattgtgccattgcactccagcctgggccacaagagtgaaactccatctcaaaaaaaaaaaaaaaaaaaagtttctgcaactcaccctgacttgagctagactaccttcgtatactgtgttctaaaccagggtcaccccacacacaccttagtagacatctcagttaataaggagcccccgacatgactctttgaactcaatccagcatctgtgccctctgtcctcagaatcatgtccctaaggaggaagctggagctccacgaggggaggggccggccatcccaggagacaccccaccacccactccccgctctgcccgtcttgagagaatgacccaggccttggcactgcaggcggggtccctggaagatgggggacccccacggggaaggtcagcagggacaagggatagggacagggagaagctggcttgggaagatgagaagggggtggacaaggacttgggaggagagggggcatctcagcaagcatatgctctcattctctcctgctttcccagtgagggcaccccagattctctgcacaaagcccccaagaagaagagcatcaagtcatccataggccgtctctttggcaagaaagagaagggacgaatgggacccccaggccgggacagctcttctctgggtgagtacctcactctaacccttccctcctttgttccttcctcccttcctccctccctttctttcttctttgtatgttcatttgacatccattcatgtcttcattcatttggtgatttatttagaatttggaaggaacacagcttgccaaggtaggcgggaggaggagggaaaaggaaagggcactctgggacctgcttgggtgactgggtaggtaaaggaatttatttcctttacttatttttttgttgttttttggtttttgttgttgttgttttgagatggagtttcactctgtcacccaggctggagtgcagtggcaacgatcttggctcactggaacctctacctcctgggttcaagcgattctcctgcctcggcctcttgagcagctgggactataggcgcccgccactatgcctggctaatttttttgtatttttagtagagatagggtttcctcatgttggccaggctggtcttgaactcctgacctcagatgatccacccacctcggcctcccaaagtgctgggattacagactcatttaccttttttttttttttttttttttttttttgtttggagacggagtcttgctctgtcgcccaggctggagtgcagtggtgctatctcggctcactgcaagctccgcctcccaggttcatgccattctcctgcctcagcctccccagtagctgggactacaggcgcccaccaccacgcccggctaactttttgtattttcagtagagatggggtttcaccgtgttagccaggatggtcttgatctcctgaccttgtgatctgcctgcctcagcctcccaaagtgctgggattacaggtgtgagccaccgtgcccagccacctattttttaaacagaggaagagggtggggcatcctcaaagcagggcaccttcctgtggtgtgctggagcccgctggcactggctcaggagatccgctatttcaggaattggctgacatcacactggtagcttgaaattggccatggtgggattatttacaccatggaaatgggcaaatgctacaaatcagggattcccttctgcctccccaaggagccggttgttaggcatttaccagcatacaactgccaccttaccaagggcatcccagtgcatccagccgtattttggggatgactccaattcatgggcgcttgtctgcctttatcacttcctcgatgtgccctcactcactactccctcagggcctctgcctttccggcattttcctcatcacctccagcatgaaagattctgcctcccccttgagattttccaaatttcgacccctccctgcctccagctggaacaccctcagatgagacactggccactgaccctctggggctagccaagctgacaggcccaggagacaaggaccgaaggaacaagaggaagtgagtgtgtgtgagtgtgagcgtgtgtgtgtgtatgtgaatgtgagagtgtgtgagggtgtgtgtgtgcgtgtatgtgtgtgtatgagtgtgtgtgtgtgtgagagggtgtgtgagtgtgtgtgtgcagcggtggtggtggtgaacagaaatgggaattcaatgctgggaggaggtgtccgtgatcctgaacttgcttgcctggaaacccaggagctcctagagtttttattttttctttctttttttaaaaattttttttgtattttttacatttatattatattttttgtttcttttgtttttcttattttgttctctcttttgataggggttggggggagaggatttacagattcacatgtattttttgaccttctgccgtgttttgtacattcataaaagctgcgtgtgcgtatgtgcatgtgtgtgtgtgtgtatgtgtgctgatgggggccatccacagagcagggggtctccatccctgacagcttctatcctggccccttcacccttacaggcatgaactcctggaggaggcctgccgccagggcctaccttttgctgcctgggacgggcccaccgtggtgtcctggctggaggtactggggcccagaaatgccctgactgttggtccccaacccctctgacagccccactggtaggggctgcctggtcctcctggcgcaccctgcttctagcccagaggtgggggtggccatgggcctggcaggtgaggacccaggagggctcgggcttcctgttcacctaaacagtttctttctccttctccttctgcccctgccactctggccttgcccacctgggtcatggtctcctgtcgttctctctactctctctttctggattctctgtctctatttttcggcaccattcccatctctgaccacgcttttgtcattccccatatttctcctcatgtctccgatcgccctgccgatgtctccctgtctccggcttcctgtctctccccaccctctatttctctctctctatttctttctctctctctctctttctctctccctctccctcttcccccacccgccccccgccccccgtttctctccctatttgtctccctcggactctccctcatctcgtccacgtctcttttccttgtcctgtttcttctccttgcgaactttcccacgtctctgtttcgctccccacccccttgcctttccccacctccctgttcccccatctctccgattttctcctcctctgtccctctgtcccctctgtccctctgtccctccgctgcagctgtgggtgggcatgcctgcctggtatgtggccgcctgccgggccaatgtcaagagcggtgccatcatggccaacctgtcagacacggagatccagcgcgagatcggcatcagcaacccgctgcaccgactcaagctacgcctcgccatccaggagatggtctcgctcacctcgccctcagcccccgcctcctcccgcactgtgagtgtccggcggccaattccagccttcgcttcctcagagccccgcctcttgccctcagtctagccaatcctgggcctgctcactcccctgtcccacgaccctgcttctcattggcttttacccccctcagcctcccctccactcctaacttggcctgtggtccgtccctgtggtactccaggaggggcccaggccacctccttccctgactctctccctctcctcggcatttgctgtcccactcaaatgtcaccacctctaagaagctttctttgtcagctaaacgagtttccccatcattccggcatatcagcaccttctaattttccccatagcatttattgccttctaattattttatcttttctttcctttttttttggagacagagtttcgctcttgttgtccaggctggagtgcaatggcgctatctccgctcactgcaacccctgcctcccgggttcaagccattctcctgtctcagcctcctgagtagctgggattacaggcgcccgccaccacgcccagttaatttttgtatttttagtagagacagggttttgacacgttggccagactggtcttgaactcccgacctcaggtgatccgcccgcctcggcctcccaaagtgttgagattacaggcgtgagcccctacgcctggccctcgttccaacttttgattacgagacatttcaaacatacagaaaatcatgtgtacccagttcagcgattctcaaacttttgctgtacttgctctgttgtgtgtgtggggtggaggcggggagtggggagtacaggttgagtgtcccttacttgaaatacgtgggaccagaagtgtttagaatttctgattttaaaaagttttttttgaatatttgcatataaatgaaatatcttggggatgggagccaagcctaaacatgaaattcatttatgtttcatatgcatctcatacacatgcctaaaaagaattttatacaatattttattttttatttttattttattttttcgagatgggagtcttgctttgtcgccaaggctggagtgcaatggtgcgacctcgactcactgcaacctctgcctcctgggtgcaagcaattccaatcctctgcctcaaccttccgagtagctgggattataggcgcccaccaccacgccctgctaatttttgtattcttagtagagatggggtttcacca[138 bp omitted]actgcattttgtttgtgacttgtcacatgaggtcaggtgggggattttcctcttgtggcttcgtgtcagcacgtaagtttagggccaagcactgtggctcacacctgtaattccagcattttgggaggctttggatggccgatctcttgaacccgggagttcgagaccagcctgggcaacatggcaaaaccccatctctactaaaaatacaaaaattagtcgggtgtggtggcgtatacctgtagtcctagctactcaggaggctgaggtgggaggatcctttgagcccaggaggtcgaggctgcagtgagctgtgattgtcccactgtactgcagcctgggtgacagagaaagagtgcatccaaaaaaaaaaaagtttagaattttggagcattttggattttggattttcaggttggggatgctcagagacctgtacttgaatgtaattggagaaagtcataacatcttagcccccaaaattactttagtgggtctttttcttccttgtaaacaccacatcctttatcacacctaagggcattcacattgttgttaatttctttttcttttcttttctttcttttttttttttttttgagatggagtttcactctgtcgcccaggctggagtgcagtggtgcgatcttggctcactgcaacctccgtctccctggttcaagtgattctcctgcctcagcctcctgagtagctgggattaaaggcacacgccaccatgcccagctaatttttgtatttttagtagagatagggtttcaccaacgttggccaggctggtcttgaactcctgacctcaggtgatccacccgcctctgcctcccgaagtgctagaccactctcagcctaatttttgtatttttagtagagatggggtttctccaggttggccaggctagtcttcaatctccaaaagtgatgtgcccgcctcagcctcccaaagtgctggcactacaggtgtgagccaccacgcctggccacagttgttaatttcatttactattcactctgtattcaaatttccccaacatacttaaaatatgttcattgtttctcccccactaggacgaaaagtgtctgtcgtgtcccttgccatatcccacaccctatgacggtgactggtgcctgacactcaccagaagtacataaatgtttttatccttgtatggattcctaactcgtgaggttgttgggagcagaagctcaataaatgtgaaccccccccgccatactccctaaacatttgcaccatggctgtgtctgtcccccacttctgaatcctcattctgtacctctgtgtgaggtcagcgaggtgacgtcatttgcacagggccacacagcaaaatgcatggcagggtcccaattccaacctgaatttgttcaactccaaagtcacattgcctggtacatggcaggtgccctataataagaatcattccttttctctgttactgcttgccccagaaagcaggagggacataaacgtgtggcccagggccttcaggaggacaccctccttcctctcccccacgcgaagccctctcccaccatccattaacactccctgcccctcagtccacaggaaacgtgtggatgacacacgaggagatggagtcccttacggccacgaccaagcccgtgagtgccccctgccggccgccttgggggtggcactaaccttctttgggggtgggggcggggaccgagtctgtggccatccctaagtccgctccttgcgtcctcctctgcctgccccttaactcaccccttctctcccctcttcctactaacgggtcaggagaccaaggagatcagctgggagcaggtagggggcgcggggcggggcgtgagcgcatgaacaggctgtgcacgacgcatggatgcccctcctccgagccctgcccctgccttcaccagaacatgccatcatccccatgggggggcgctgcgccaagcttggctctggactgttccattatggcttggcggtggggagggtagaggggatgcgatgtggaagcccagactgttgcatagtcagccttatgcatggaccatttcatcatcgtgggttgtgggggctctaaggggcttcaattctgtagctcaggagagactgagcagccggtgtccctatagtggagggggcgggggctacagtggactgctcagtgtaccagggccaaggaggacacactggctgtggtggtggtgaggcagccaggctgaatgagaagttggggaggaggagctacactttgttctcaagaaacaagaggcggccgggcgcagtggctcacgcctgtaattccagcactttaggaggctgaggtgggcagatcacctgaggtcaggagtttgagaccagtctggccaacatggtgaaaccctgtgtctactaaaaatacaaaaattagccgggtgcagtggctagcgtatgtaatcccagctacttgggaggctgaggcaggagaatcgcttgaacccaggaggtagaggttgcactgagccgagattgcaccattgtactccagcctgggtgatagagccagattccatctcataaaaaccaaacaaataaactaacaaaaaaacccaagaggcatgaactcactgtccacggaggaattatgtttgactgtggtcatagatcacatatttccagccagggggaggcgtggattttgtgctgatgctgaaaggagtgagggacttgggactcatctggaatattgtcctgggccagatataacattagacaagtattttcaggacattgcaagagtgatggccctttcttagtgggagagctgccttgaaagagtccattgtcctgacttgggggtttagtgacgttggactgcagtgagacagagttaaagcagtgcttccccaaatttaatgtgtagtggggtggcacacacctgtagtctcagctacttggaagactgaggcaggaggaccgcttgagcccacgaagctgaggtcaacctgggcaacatagtaagaccctgtctctaaaaaataaacaaatacagccaggcgcggtggctcatgcctgtaatcccagcacgttgggaggctgaggtgggcggatcccttgaggtcaggagtttgagaccagcctggccaacatggtgaaacgccgtctctactaaaaaatacaaaaattagccgggcgtggtggctcgtacctgtaatcccagctactcgaaggctgaggcaagagaattgcttgaacctgggatggggaggttgcagtgagacgagatcgtgccaccgcgctccagcctgggtgacatagcagactctttcagaaagagagagagagagagagagagagaaagagagaaagaaagaaatttaaaaataaatataatgtatatttcgaatcacctgagggtcttgtgaaaatgccgataccgacttcagtaggtctggagtaaggtctgagattctgcaattccagcaagtccacaggtgatggtgacgctctaggtctcaggacaactgtttgagtagccaagagtatatgctgtcatgaagggctaggagacaactctggattggtccattatcctgagcagagattggtcattgtcctaccatggggtgggaaaaaaccttggattgggaggttggactgtacccctctcatgcacagtgggaaggggccagagggcctgactcttccctcacctgcccatggccccagatcctggcatatggcgacatgaaccacgagtgggtggggaacgactggctgcccagcctggggctgccccaataccgcagctacttcatggagtcgctggtggacgctcgaatgttagatcaccttaacaagaaggagctccggggccaactcaagatggtggacagctttcacaggtgggggctgcctggccagtggggacagtccaaagggaagccccaccccagagagtctttggccaataggattggccatgggagattcccaggcttatcttggcccttttagcctgagttctcaggaaatcctgactctgtgctcctttcaccaatgagatggtccacaggaaaagttcagatcctgaaatggcttggctagttaaccctggaccccttccaggctggccagtaggaagtgcctattattgaaaatgcctcacctcctgagggggtcaacagtcaatagaacttatcagctccccaccctttccaagaagagcgcagccagtggggagggacccgtaggagcagcagtctaggggactggaaagctcatccgtgactccacttcccctgctgctcagggtgagtctacattatgggattatgtgcctgaaacggctcaactatgaccggaaggacctggagcggaggcgggaagaaagtcagacccagatccgaggtgagtagagcctaagggtccctttgggagccaggtggagggcgtggagctggatggggaggagagggggtagggggagaccggagaagcaaattggcaccataaccgtgggggtggagccagcgtggggggcgtggcccgaagagaccaaatggaggtggaggtatgggctaaactgaactctccaggccacgggaggggcacggctgagggtcccttccgtccccagacgtgatggtgtggtccaatgagcgggtcatgggttgggtgtccgggctgggcctgaaggaatttgccacgaacctcacggagagcggggtacacggggcactgctcgccctggacgagaccttcgactactccgacctggccttgctcctgcagatccccacgcagaatgcacaggtgagctgccgctgggcccggagcatgctgggcgtccccacctcgcagactgcacgctccaaccgccccctccacctcctctttccaggcccggcagcttctggagaaggaattcagcaaccttatctccttaggcacagacaggcggctggacgaggtgggcgcggcaacagctcagagggctctgctcccagcggctcctcgagaggctgagctgagggggcggggcctgactattaatggtcacggttggaggcggggccaggagaggggcggggttaaaggagaggtgagacccggagaggggtggagtcaaaggaaggggcggagtcagacaaggcaggagtccctcaccggctgtccggctcctatacctaggacagcgccaagtctttcagccgctccccatcctggcggaagatgttccgggagaaggacctccgaggcgtaactcccgactcagctgagatgttgccccccaactttcgttcggctgcagcgggagccctgggctctccggggctccctctccgcaagctgcagccagaaggtggggggctcccaaatgcgacagcccttcctcgcttccctagggtggggcatggaccacctcagtagtccgggttctggaatggcctagtcctttctcgcccacccctgaggaatggactgctccaacgttccggactcccccgtcaggatgaaatggataaatcccactcccccttcccagggcgggagtgaactcgcccaatgcgagtttgagtccttggctgcggggaagggagggaaacccatgtggagcccggcgatcgttgtgacatcgggaagggaagtccaaagggaggaatcctggagaggaacagggaggagggtgctccaggctgaaccgctgctcgctctccctccaggccagacttctgggagttcccgggcagacggcgtttcggtccggacctattcctgctagtgcaggcctccaggtgaggaccgtgctgggcgaccttgggggtgcggggcggcacggtggatcttcactgctccacgcgctgcccggcgtcatgcaggtgacctcactcggacggaagaatcttcccgaggctgggctgttccctctcctgcccggactgtggcctcgccggggagagcgggcgggggagctcgcgccgaggactggaccatctgtacagaccagcgggagtgcgcgcgcccgcctcgcacagggccggggcctggaccaaaccacatgaactggactgagagggggaagaagcggggaggaagaaatcccgccccaaacgtccgctttccttttctctactttgtaatttattgatcagtttctgttgggagacgggtgtcctttacccgcgggaagggggcggggcttccctcccgggccgcatgcggggagaggctgctccctcccctttttcctgcccagtcgcggggcccaagtcttccttcttcgtccgaaaggaggggaggggggactcgctgctacaagcctcgccccctgtgccactcagctccgccccgccgcgtccggtcgccggtcccccgggtcatctgcgggcgggttcccctctccctcccccgtgtctcgtgtccccggggcctcaccgccccccgtgctgtggccgtgtccgtgccccgggggtagggggcgcagaatggcgcttccccttctcctctggctccggggtttgcatgggagaatcctctttccacgatgccgctgggcgacgtggcgtgggggcagggggacggtgggggagccctcgcccccgactctcggtcggcctccccgccccaggcgtcactcagtgatcacgggtaaagagaactgtttcaaaaagcttccttgttgactgattttttttttgcggggggggggggggctgttcaaccaaccacctcgagccaggagtccaggcccctcatccctcaagtctaggtccaggtctctagaccctacccgcattccccgatgccctgagattcccagaccccacgtctgacaatgaggtttcggggagcacgtttattcggagaaataaatatagctcgtggaaaggggttggaaggcagggggaggtacacctgcgtcgcagtcgagcgactgggtcagggttccggcgtttccagcatgtctgccagggccctggagacgagaacgccagaagttagacagctggtgttcaaagcccaccccaggacgcttagagatcattaacctgcccatttcatggacggggaaatggagtcccagagtcatctgataactcatagcgagacaagcacttctctaaacggggcttttacacgctccccttttacacacttactgataaagggacgaggagaaatagtcaacgtagcttcctgtgggacagcagagaaaagaggcttgaggggtactgcacgagcaaaattaggcagccactcagtatagcgtgcgagattagtgctagctccacctccttttccctaattccttcttccaactgaatcccttctaccggacccctttttcgttctgggtgattccgttctccagtagccccgccccttcgattcctacttgagttggcctcgcccattaggctctaagcccgcatctcaaccctccactcatttctgtcccttggctccagcaactccacctggtgttcctcgagccaggccccggcccacgtgctcagagccttggccacgcctcccctcttagccccgccccaccagcctaccgggccaggctccgcccccaccaggattcaccacgctgggcccggcaccttcctcaggtttttccagggccccgcccatgctcacctggagcgcagaccgtttcgcagaccagcgggcagagatagcagaactgacagtgctggaggcggggacggggagagagagtgagcgtggggcgtggccgggggcggagttaggatggggccgggaccagacccggaccagaggctaggtctaggttaaggttggagtcaggatcgcttgtggagtcaaggttgcatcaggggtaaggggttgggtcagaggccaggatttagggctgggggtcctcagagggtcccggtgcatcctgaggcccagtggagccttgagtgtgaggtgaggtctcacctggcactggtcgcagtgctcacccatgttctcctcatcacagtgacagctctcacattcagtgcatcgctggggaccgggggagcctggttagatggaaactctaacgccacttgggaggtacccgcccctggcccacccctgcaccctggacgcttccccagactctaccctctttatctctaacactgagctctgtatctgccccccaaaccagcctcccctcccctcccctgcccctg[131 bp omitted]cctcggcctcctgagtagctgggattacaggtgcgtgccacca[134 bp omitted]cacacccggccctgcccctggttttctatctcagggcgaccccatgtctccctgtcagggtgggctcaggtgctctctccacccgctctctgcctattctccccctagcctatcagcccctgtgccatccctccttcccccgactctctttgccacagacccctgtctctgtccccacaccccaagatgcagcttgggtcttgtcctctccttcctggaccactgccccagcctcccagccttcagtctgtcctcacctcacatgcctgcagaaggatctcttttctttcagaactgaccctggcctgcccttgctctgagccctcccacagcaccaccccagggcccctgggacagattctggggacaccttggtgggtggatctgggctggggacatacattgcagaaggagcagtagccacacagggaccctggctggtagttcccatactcctgagcatcctgtggacctgcggggacaggagggcagcagtgacccaggctgactcggttccttcccacccacaccagcccaggccacttacctgtgtcctcaccgctttcctcctcgctggaggcacctccagcctcctctctcctgtccagtgggttggggatgatggtgaagcggggctcatcttcctccagcccctcctcctcctcctcttcctcctcgctgtggtctgggctcagtggggccccaacctcagccctctcttccctcctctcctcgtcttcttcctcctcctcctcctccttgtcttcctcttcttcctcctcctggttcaggctgaggccatgaccttcctcctcatcctcctcatcttcctggtcccggctgccatgatgggtgcctttctctccctgctctgaactttcatcgtcttcctcatgggagccggggtcctcttccttctccttttcctcctcagaatcatccttcctcaaatggcttctatccttgaccactgtgtgtcctggggggtgatggctcatctctttgatggaccctctttgaccatggccagtttcttcatcttggtggctttgcctgtggctgggggcctggtggccaagctcagcagagacctcctcatcttcctccctggggactctgtggtggtgatggtgagggacttctgttttatactcatcttggaagtcctcttcatcactcttgtggcctcgaggttggtggcttgcaacatagtggccgaactggactgtgatctcctcttcttcctcttcctcatctacaaggccatggtggacatgttggggaccctggtgccaacgttcagtggacacatcctcatcttcttcctcgtctctgtggccttggtgcctgtggtcagggacatgatggtggtgttcacctgagacagcctcaacctcttcctttctgtggtcttggtgcctgtgggcctggtgtccatactcagtggagacatcatcatcatcattgtcatcttcttcatggcttcggtgcctgtggctggggtcgcgatgatggtgtccatctgagacatcttcatcctcttcaatcccgtggccttggtgcctgtgagcctggtgtctatattcaatggagacatcatcatcatcatcatcatcatcatcatcatcatcatcatcgtcatcttcttcatggccttggtgcctgtggctggggccatgatgatggtgtccatctgagacatcctcatcctcttcactcccatggcctcggtgcctgtgggcctggtgtccatactcagtggaggcctcctcttcctcctcctcctcctcctcctcctcttctccttcatcatcttccccatcatggcctcggtgtccatgcctgaggatatgatggtgatgctcactggacacaacttcatcctcatcctcgtcttgatggctgtggctcctgtggctggggaggtggtgcctgtgctcagctgagtcttccgtgtcttcactcccgtggcctctgtgcccacgggcctgcccaccatgctctgcaaagacctcctcacctgagacaccctcatctccgactttgtggtcttgggacctgtggcctgggagtaggtgcccatattccttggagacatcttcatcctccttttcacggtctgggtggctccagaaatgatgcccattctctgtggaaacatccttgttctcatctggatggtctctagggctgtggaggtggtggcgaagctctgctgatgcctcctcggagagcccggcgactccagtgctgttgttccggtttctgaagcctagcccatcccctctgagctgctgggtcatggccggggggaggagcaggctggccaccccagcccagaggacagaagcgtgcagccatggcctatggtggcccatggggacggacaggcagcactggctccagctgcctctgcggcaatgtggacaaacgttggggtctttgtccctttggggttggtctctttttttctctgtgtctctcctttgtcctttcggtctctgtccaccttcctctggtccttgctgcctggctctggacacccctctgaggctgtctccggagccccctgacccccctctggggccctccctccccattccccagccaatagggtccttcccctcccctctctccagctaaatttactctcagccctgagttattctgggtcagtccccgcctgcctgcctcctgctcctcctcctcccagctggggaggggaccagtgaggggtctctccctggccaggagacggtggccaagggacttgactttgaactaccaacaagctcacgtttggcagctgcaaagacaaaggctagacttttagcaggtttttgggggagcctggggcacctgggggaggcagaagagacttatcagaggggagagactcctgggacggaaggactgggggttcgattgcggggtgtttccagctggaatgatacgtgctggtgagagagtgatgtcagtattgaggccctagaatggggggaaaggaacatggcccccaacacacgtgcccatgacctcctgtccctggaactcagatctgggggcagggactgggctaggccagggctataaatacagctgggaggggtagggggactcaggttacggaggccacagctgtccccatcacagagggctggcaggagacaagtggccttgcccgtctctgtgtgtcagtatttcctactcctcacccttcatgactgcccccactagggtctcctttcctgttcacgggtcctcctctctcttcaattctgtcatctgctctctcagggtccctgtccctcctccatgggattgcctctccctctcactctgggcttctgtcccactcttatcttagtgtcagtcctcccccaagtctgtgtccctctctctcccctaaatctctggcccctcctttctgagttcctgcccttcccccaattctttggtttttgcatccccctctgccccttgcctcagtcaaggtgtctcctccccatctctggcatccacctctctgggtctctgtccccactctctctcagagtctctgtccccctctgtctcagagtctctgtccacctctccctgggtctctgtccccctctctctgggtctctgtccccctctccctgggtctctgtccccctctctctgtggatctctgtccccctctctctgggtctctgttcccctctctctgtgggtctctgtccccctctctctgtggatctctgtccccctctctctgggtctctgttcccctctctctgtgggtctctgtccccctctctctctgggtctctgttcccctctctctgggtctctgtccccctctctcagggtctctgtccccctctgtctcagagtctctgtccccctctctctgggtctctgtcccctctccctgggtctctgtacccctctccgtgggtctctgtcccctctccctgggtctctgtccccccatccctgggtctctgtccccccctctctgggtctctgtccccctctctctgggtctctgtcctcctctctctctgggtctctgttcccctctctctgggtctctgtccccctctctctgggtctctgtccccgtctctctgggtctctgtccccctctctctgggtctctgtcctcctctctctctgggtctctgttcccctctctctgggtctctgtccccctctctctgggtctctgtccccgtctctctgggtctctgtccccctctctctgggtctctgtccccctctctctgggtctctgtcccctctccctgggtctctgtccccctctccgtgggtctctgtcccctctccctgggtctctgtccccccctccctgggtctctgtccccccctctctgggtctctgtccccccctctctgggtctctgtcctcctctccctgggtctctgtccccctctctctgtgggtctctgtcccactctctctgggtctctgtcccactctctctgggtctctgtcccctctccctgggtctctgtccccctctctctgtgggtctctgtccccctctctctctgtctatccctgggtccctgctgccccaccttctgattctctgtcccctaagtctttgtctccccctctttgggttaaattgtcccctccctgtctggcatcctcctttctgagtctgttccctctccgccactggcccccaactccttctgttcccatctcgcgcttgcccttggagtctcccctgtgtgtctctctccccccggcccggacctctgcaccccccaggtcgctgtccctctgtccccttatcgcggcctgggacccgccctctccccgcctcccgctttggcgtctccaagactccccgccccccagacctcgccccgccccaggctaggctggaaagtggaggatccggtttgctctgggcgggtctggaagcagagccggcggagggagcgccggggccctgggctgcaggaggttgcggcggccgcggcagcatggtggtgccggagaaggagcaggtgagcgccggaccagggtctgcgggagcgcggagctggggacctcgcctccaggctcccagagaggagggcgctggacacccagattcctgggtcagacggaggagggggatgggagggtccaggttccagggtccagggcatgggggtcgagactcctgagtctggagcgggagggcgctgggggcccggactcctgtgtccgtggggagcgcacggggtgggtggctctgtgtcccataggacagaactgggtgccctctcaccccacttccacccctacatttgttcctgtccccagagctggatccccaagatcttcaagaagaagacctgcacgacgttcatagttgactccacagatccggggtgaggagttcgcccctggactgaccccagagggtccgcggcccgctgaccccgcccgcggatggtcacgccccagccctgctccttccccattcctggactcggggaccttcccaagggcgttccttgccgacgctctccctctaggagcgtttgggtctgtgtagacacccctcattccccattcgccattctcccgctcagggtcagtgtagacgctccagggctcggttctgcttctttcctccccgatgtctcttctatgtgcttctgtctcttcgtgtcactttctgtgtctctgtctttcccttttgggtatttctgtttcattcattcattcattcattcattcattcattcatccatccatgcaagaaaccctcactcagcgctcccaaggtccctttagcctaattcaacggccctgccagggttccaatttcccctgggacacgtgctgtgtggcttcgggcaaatcatttcacctctctgggtcccgtttctcatctgggcatcaaaagaggcttgatctcctggggttattatgagaattaaacaagttaatgcttgtgatattcctggcacagcgcccagcacaggacgctgggaaatatctgcagctcccactgggaggtggcaattattaccgcgggcgggccctgtcttggtggccggggacaccaattgagctagatagggtgtgtgcgtccgcgaggagctcccgcccttcagtgacggcctctcaagcggatccaggctttctagtttttttttttttttttttttttttgagacggtgtctcgctctgtcccccaggctggagtgcagtggcgcgatctcggctcactgcaagctccgcctcccgggttcacgccgttttcctgcctcagcctcccgagtagctgggactacaggcgcccgccaccacgcccggctaattttttgtattttagtagagacggggtttcaccgtgttggccaggatgatctcgatctcctgaccttgtgatccgcccgcctcagcccctcaaagtactgggattacaggcgtgagccatcgcgctgggccaattttttgtattttttttttagtagagacggggttgcaccgtgttagccagatggtctcgatctcctgacctcatgatccgccggcctcggcctcccaaagcgctaggattacaggtgtgagccaccgcacctggcccaggctttctagttttttgttttttgtttttttgagacagagtctggctctgtcgcccaggctggagtgcagtgttgcgatatcagctcactgcaacatccacctcctgggttcaagcagttctcatgcctcagcctccctagtagctgggattacaggtgcctaccaccatgcccagctaattttttgtattttagtagagacgggatttcaccctgttgcccaggttggtcttgaactcttgatctcaggcaatgcacctgccttggctttccaaagtactgggattacaggtgtgagccaccgcgcccagccctctagttgtttttcaagacagtttttggggtgcgggaagtatccacattcctacttcagtgtgtattttgttatgactatatattagtgcagtatggcttgtaaatgatggataaataaacagatatgcgcttgttggacgtgagtgctcaaaacctttttactgataggtcagtgtggtcaagacaatttaggaaactctggtctggcctgaggaggaagaaacgcagaagataattatagtaaggcaaggggttgcagctcccaaagacgagccactgggctctgtgagagctgggaggaggtgtttgcttaagactgggaggggacacaaaatgtcactaatggtttctggagggaggaagagtggctagtgaggtgacatttgaaagtgagctggagagaggcccatggaaagcgatttggggccgggcattgtggctcacgcctgtcatcccaacaatctgggaggccgaggcgggtggatcacctaagtcaggagttcgagaccagcttggctaacatggtgcaaccctatctctactaaaaatacaaaaattaactgggcgtattggcgcatgcctgtaatcccagctactcaggaggcaggagaatcacttaaacctgggagacggaggctactatgagcagagatcacgtcactgcactccagcctgggtgacagagcaagactccatctcaaaaaaaaaaaaaaaaagaaagaaagaaagaaaaaagtgatttgaacagcatgtgcaaagtccttgctaaggaccatatggtttggcttgaatatgaatcaaagttcagggtgcagggagcactgtcatgagagaagaggctgcagaggagggcagggccagagcttgcagggtgtcagaggccaccctaaggggctgggatcttgtccttgggagctggggcatcaccgcagcagtggggttggctctgggtgtggaaaaactttctggggctgggagaggatgaacaggagctcgggaggaggctgtagagagcgtctgagcgggaggggtagtggcctgagccaggtcagggctttcgggacacagagaggagggcatggggcaaagactcagggggcaggaaggcagagcttggggcttgatgagggtgatgagggagagagggggtgccgccatcggtggatggctccgggacgtatgctctgctgactgggacacagtggggctgtccctgagatggagagctcaggagggcaagcaggtttgggaaatgtcgctgagtgcaatgtgggaatctgtgcatatgagcggcctagggggaccgaggggcatgtggggactgagattgggaaaggtctggactaatgtccagaatctgagaggtccgagttgtagctggtaattgaaactggaagtaggtaagacgtcacagggaaaacaacgtgtaaagtcaggggagttgcaaactggcaattctatagccaattgtgtgcgtgtgtttgtgtgtgtgtgtgtttagaagagcatttaaaaatatctgtcttctgtctctctctcttttttttttttttttttttttgagacagggtcttgctctgttgtccaggctggagtggcacgatcatggttcactgcagccttgacctgctgggctcaagcgatcctcccacatgagcctccggagtagctgggaccacaggcatgcaccaccatgcctggctaattttaaaattttttgtagaaaccgggtctccctttgataccagaccaggctggtatccaactcctggactcaagtgagcctcccacctcactctgcctgccaaagtgctggaattacaggcgagagccaccatacccggctacctcttttttttttttgagacggagtctcgctctatcacccaggctggagtgcagtagtgcgatctcggctcacttcaacctctgcctcctgggttcaagcgattctcctgcctcagccccccgagtagctgggattacaggcacccaccatcacgcctggctaatttttgtacttttagtagagacaaggtttcaccatgttggccaggctgatctcgaactcctgacctcaagtgatctgcccacctgggcctcccaacgtgctgggattacaggtgtgagccactgctcctggccctggctacttctttctgttgagttacttgactggcctctgcacacattgggtttgagaatcatgtagggaaggcttgcactgggaacacctacactcaagggaggtgaaaagcaagagaaagccacaaacaagtcaggcatgaagcagccggggcggggaggaaggccagaggggcaggggtatcctgccaaggagagggtttccagaatgagagcctttcagctgtagccagggccacttgtgatacagtcagatgaaacctgaataagggccgttgtatatggagccaggcaggaaattgatgatttttatcaagaacaatttcaggccaggcacagtgactcacagctgtaatcccagcagtttgagaggccgaggtgggctgatcacttgaggtcaggagtttgagaccagcctggccaatgtggtaaaaccccatctctactaaaaatacaaaaactagccaggtactgtggcacatgcctgtaatcccagctactcaggatgctgaggcacgagagtcgcttgagcccaggtggcagaggttgcagtgagctgagatcgtaccactgcattctagcctgggagacagagcgagactccatctcaaaacaaaacaaaacaaacaaacaaacaaaaaaacaatttatttcagtttctgtggctccaccgaggaaagagtgtaggaggcaagctgtgcagaaggaatggctcctagcactgaatgtcagaattttccacgattttggaaacgttctatgtctacatccaatatggcagtcctggccacagggggctactgggc[136 bp omitted]ctgcctcagcctcccgagtagctgggactacaggcacccgccaccatgccaagctgatttttgtatttttagtagaaacagggtttcaccatgttggccaggctggtctcaaagtcctgacctcaggtgatccgcccaccttggcctccctaagttctgggattacaggcatgaaccactgcacttgacctgaattttttatttgatttaattttaacttattagaacagaaagagctccatggctacaaagaacccatgcagctatcacattggacagtacaagctccagactattccgtgaagagcttttattttattattattatttttttttttttttgaggcagagtctcattctgttgcccaggctggagtgcagtggcacaatctctgctcatcacaacctccgtctcccaggttcaagtgattctcctgcctcagcctcctgagtagctgggactacaggcgcgtaccaccatgcccggctaatttttgtatttttagtagagataaggtttcactatgttggccaggctggtctcgaactcctgacctcatgatccgcccgccttggcctcccaaagtgctgggattacagtcatgagccaccatgcccggccttatttcttatttttagtgacatggtcttgctctgttgcctagcctgaactgcagtggtgtgatcatggcttattgcagccttgaactcctgagctcaagtgatcctcctgctacagcctcctgagtagctggaaccacaggcgtgcaccaccacacctggctaattaaaacaattttttttgtagggatggggtctcgctctattgcccaggctgttctcaaactcctgggctcaagcagtccttctgccttgacctcccaaagtgcttggattgtgcccagccgtccttgaagttttgctcagaagagcaaactttctgggaagtagctgcaggtgttggaagtagctgcaggggaactaggggattcaaggatggagctgaaatgggtgaacggacaaagtcggtaaactgaggcatgccagggccctggaggtagactcaggaatgaagaagacactttattgtagttctcactgtgccaggacctggcctaagtgtgtttggttcatcccatgtgtggatcagttagccgttcttttagtgtctttacggcttttgccaaatccttgtagcacctctgctatcccttctgtaaaattgctcttaaatctgctcactaggtttgtgtaaatacaggtctcccctgatatctgaactcctggaatctggaacaaagaatttagatacatttttctccttctttcttcctttctctttcttttcttttcttttctctctctctttctttctttctctctttctctttctttctctctctttccctccctccctccctcccttccttccttccttcctttccttcctccctctctgtctctctccctccctccttcctttctttccttagttttttttttttttttttttttttttttttttttgagatggagtttcgctcttgtctcccaggctggagtacaatagtgtgatggctcactgcaacttctgcctcctgggttcaaccaattctcctgcctcagccttctgagtagctgggattacaggcacccgccaccacgaccagctaatttttgtattttttttagtacagacagtgtttcaccatgttggccagtctggtctcaaactcttgacctcagatgatccacccgcctcagcctcccaaagtgctgggattacaggcatgagccactgcgcccggcctcttgcttgcttgcttgcttgcttgcttgcttgcttgcttgcttttctttccttcttttcttttttttgaacagggtctcactctgttgcccaggttggagtgcagtggcgtggtcacagctctctgcatcactgcagccttgatctcccaggctgaagtgatcctcctgcctcagcctcctaagcacatgctgccacacctggctaattttattttattttattttatttatttatttatttttagagacagggtctgactatattgcacagctggtctcgaactcctgggttcaggtgatcctctggccccagcctcccaaagtgctaggattacaggcatgagccatcatacccgaccctacattttcaaatgaatttctcattctccaaacccctgttacttactcaggtgccaatcacctttagaaagcaagagagacttgtgcatttctttaggtgggggaaagttttatatgtggaaactttccaaatggaaacctgttccatttggcacagagaggaagaaacaagccacacagaagccaaagacaatgaaaagcaaacaaaggtgtttccctactcgctagatggctgttgccagctccattttttgagcccgaggcctgcttttcttgttcaaaagagtagcaaagggttaggcattcaaaaatattctagcacccggctgagcctctctccttgacagtcgtcaggagaactgaaaaaggaatgactttctcactgcgttattcaaggttattttaagctccgtgtgaagttcgtgtcgcgttgcctctggctgggactggtatgcgagcctcatttcaggaaacacggcgttctttccctggctcctcatagctccgtggagtaggccgcgctattattgtcttttcattagaggaggaaatttaggctcagagaggtgaagccgctcgcccaaagtcacacagccgcgtcagccccgagcatgcgggctctccctgagttacccgctggatgttctttctcgtgttgaacgtcatgtgtttggatgggggcacagggcacagcaaggatacccccagtggccctctgccttcccacttgaggctcctcaggtgacagtgacctgcttcttcctgctcaggctttctggactcactggcttccttcccgtggggaaaggggaccgtcctcggctccagtctctccccgaggccgtcagagccagggccaggggcagcgtggactctgcctgcctctgtgggtgtggactcagtgtcgacagccccctctacaggagcatgaacacgctgacagggtgctggggtcggggggcagccctgggttcacgctccgccctcgcacccccagagggaccttgtgccagtgtgggcgcccccggaccgcccaccccgcagtggccatggaggatgccttcggggcagccgtggtgaccgtgtgggacagcgatgcacacaccacggagaagcccaccgatgcctacggagagctggacttcacgggggccggccgcaagcacagcaatgtgaggcgggcctctgtgggcggggcccgggcaccagggggctgcatgctcggggctccagagtggagccgggacgcccgccctgaaccctggcccctccgcccatccctgtcttggctctctttgtcccctccgccccacctatcttctctctgagggggtcccgttctctctgcgtctctttgtctctgtctccctctgtctccgtgtccctctctctctgggtctctgtccccctctctctctgggtctctgtccccctctctctctgggtctctgtccccctctctctctgggtctctgtccccctctctctctgggtctctgtccccctctctctctgggtctctgtccccctctctctctgggtctctgtccccctctctctctgggtctctgtccccctctctctctgggtctctgtccccgtctctccgggtctctgtttccccttttctgtgggtcactgtcctcatctctttgggtctgtgtttccgcttttctctgtgtctctgtccccgtctctctgggtctctgtctctgtctctctgggtctctgtctctgtctctctgggcctctgtttccccttttctctgtgtctctgtccccgtctctctgggtctctgtcttcctctctctgggtctgtttccccctctctctgggtctctgtccccatctctctgggtctctgtctgtttctccgggtctccgtccctgtctctccgggtctctgtttccccttttctctgggtctctgtccttgtctctctgggtctctgtccctgtttctccgggtctctgtccccgtctctccgggtctctgtttcccctttactctgggtttctgtccccatctctctgggtctctgtccctctctctctgggtctctgtccctctctctctgggtctctgtccctctctctctgggtctctgtcgccatctctctgggtctctgtcccatgtctctgggtctctgtccctctctctctgggtctctgtccctctctctctgggtctctgtccctctctctctgggtctctgtccctctctctctgggtctctgtccccgtctctccgggtctctgtttcccctttactctgggtttctgtccccatctctctgggtctctgtccctctctctctgggtctctgtccccgtctctccgggtctctgtttcccctttactctgggtttctgtccccatctctctgggtctctgtccctctctctctgggtctctgtcgccatctctctgggtctctgtccctctctctctgggtctctgtccctctctctctgggtctttgtccccgtctctctgggtctctgtccccgtctctctgggtctctgtccctctctctctgggtctctgtcccatctctctgggtctctgtcccatgtctctgggtctctgtccctctctctctgggtctctgtcccatgtctctgggtctctgtccctctctctctgggtctctgtccccatctctctgggtctctgtccctctctctctgggtctctgtccctctctctctgggtctctgtccccatctctctgggtctctgtccctctctctctgggtctctgtccccgtctctctgggtctctgtccccgtctctctgggtctctgtccccgtctctctgggtctctgtccccctccctgtgtgccccgctcccatgtgtccacagttcctccggctctctgaccgaacggatccagctgcagtttatagtctggtcacacgcacatggggcttccgtgccccgaacctggtggtgtcagtgctggggggatcggggggccccgtcctccagacctggctgcaggacctgctgcgtcgtgggctggtgcgggctgcccagagcacaggtgaccgagggtgggtgggggctgtctcctgggcctcggcctgcctgccatctcccccacgactgtgggtggcctcccccgccgcccagtgtgtgtgtgtgtctctgtcttattctttgtttctctccccctgcctctgcatgttcctcggcgtctgtgtaggagcctggattgtcactgggggtctgcacacgggcatcggccggcatgttggtgtggctgtacgggaccatcagatggccagcactgggggcaccaaggtggtggccatgggtgtggccccctggggtgtggtccggaatagagacaccctcatcaaccccaaggtgtgacccagggacttggaaaagggggctggaggcctggactcctgggtctgagggaggaggaggggctcgtgtttgtccttctggccccgatgaggagacgccctggtctggccatttttcccctagggctcgttccctgcgaggtaccggtggcgcggtgacccggaggacggggtccagtttcccctggactacaactactcggccttcttcctggtggacgacggcacacacggctgcctggggggcgagaaccgcttccgcttgcgcctggagtcctacatctcacagcagaagacgggcgtgggaggtgagtggtcgaacccatgacccacaacccacgacccacaacctgcaaccccagcgctcaggatcccagtagtttggtctggtcgagatttggggaattacctatggttaagtgtctttccccgtcattattcatggttttaaaaacttctgtctgagagtgagttagctcacatcagtaatcccaacactttgggaggccgaggtaggaggattgcttgaggccagtaattcaagaccagcctgggtaacagagcaagaccttgtctctaccaataataataataataataataataaagaataaaaaataaattagccaggtgtggtgtcgtgtgcctgtaatcccagctacttgggaggctaaggtgagagaactgcttgaacccgggaggtggaggttgcagtgagccgagatcaagccactgcactccagcctgggcgacaaagcaatactccatctcaaacaaacaaacagactttattttgaaatttctcatacatacagaaaaatgcacgaaggtggacagcttgatgcatttttttctttttttgagacggagttttgccctgttgcccaggctggagtgcagtggcgcgatctcggctcactgcagcctctgcctcctgggttcaagcaattctcctgcctcagcctcctgcctcagactcctgagtagctgggattacaggcacgtgccatcacacccggctaatttttgtatttttagtagacggggtttcaccgtgttagccaggatggtcttgatctcctgaccttgtgatctgcctgctttggcctcccgaagtgctgggattacaggtgtgagccaccgcgcccggcctaatgtttgtatttttagtagagatgaggtttcaccttgttggctaggctgttttcgaacttctgacctcaagtgattcgcccacctcagcctcccaaagtgctaggattacagacgtgagccactgcacctggctccggctaatttttaaagttttttgtagagacagggttttgccatgcagcccaggtggcctcaaactcgtggtcgaaagtggtccacctgcctcagcctcccaaagtgctgggattacggtcgtgagccactgcgcccagccagccaatatcttataattttatcaaaacatgaacaagatacattactaggtttgaggaaagtttttgatttttgtgtatttttcttgtatcaatcctcttaccaaattttcttattgatctttatttttatttttggtggggttttccaattttctgggaatacaagccatgttttcttcaaataggtacttttgtcccttccagctttacaaaaaaccaaaaaccaaaaaatcaattttcacttcagtgatttcatttttttgcattattgagttagctcaaaactccaggatgaatacagtgttagtggtaatgtggtctagtttctaatttatttatttatttttttgagagggagtcctgctctgtgcacaggctggagtgcagtggcgtgatctcagctcactgcaacttctgcctcctaggttcaagcgtttttcctgcctcagcctcccgagtagctgggactataggcacgagccaccactcccagctaatttttgtatttttggtaga[144 bp omitted]atatagtgctatctttatggtgcaattggattttggtaaatatctatattgtggttagatagccctttctattcccatttcctttactttctatttgaactttcactccctctggctcctggatggttaatcaatgacaggattgactcatacaagaaacacctgcctcattcagggactcaggagtctaggtcctcagccccctcctccctggggaagttaagcattactgtcttcaaaatctagctccctcctgaagtgtccaaagacatgacaattctggccaggcgcgctggctcacagctgtaatcccagcactttgggaggccaaggtgggaggatcccttgagtccaggaattcgagaccagcctgggcaagatggcaagacccctgtctctaccaaaaattaaaaagttagctgggcacggtggtgtgtgcctgtggtcccagctacttagaaggctaaagtaggaggatcaagatgtagtgaggtgtgatcatgcccctgcactctatcctgggcgatagagtgacaccctgtttcagaaattaggctgatgcggtggctcatgcctataatcccagcactttgggagtccaagttgggaggattgcttgaggccaggagttcgagaccaccctggccaacatagcaagacccccatttctaaaataaatacataattaagtaaaaaaagaaatgacaattccaatgagcctctgaacagaagattaggacaaggctgatgtttgccgactcctgggaaatgcggttttctcctatctccagcaaaggctgatgggaggtaatcaagcccccttctcttcttgcctcagggactggaattgacatccctgtcctgctcctcctgattgatggtgatgagaagatgttgacggtataggggcccggatgcccggatctaagggggaaggagggttgggggccaggactcctgggtcctgagtcttagggagggtctgggggtctgactccgggtagggtgaatatcctgccttttctgacgtgatgaataaagaatgcctttatcctgtagcgaatagagaacgccacccaggctcagctcccatgtctcctcgtggctggctcagggggagctgcggactgcctggcggagaccctggaagacactctggccccagggagtgggggagccaggcaaggcgaagcccgagatcgaatcaggcgtttctttcccaaaggggaccttgaggtcctgcaggcccaggtatgacactgggggcccaactctggatcctgagatgggagggaactggggacttgggctcctgggtctgagggaggaggggctgggggcctggacttccaggttccgggagaagagggtgctgggcatatagactattaggtcctggaggggaatggcctcctccatccctttggacagggcccaacaggagttggggatggaggcgggctagggatgcagaactggctattccacaggtggagaggattatgacccggaaggagctcctgacagtctattcttctgaggatgggtctgaggaattcgagaccatagttttgaaggcccttgtgaagggtaaaagttgtaccctccagtcttccccctctctcagttcaaccttagacacctttcctggcctgggcacttcatccaccctctctaatccaaggcccatgccccctttacccctcttaatatttttcccctttggggctttgcatggtgctatttgggcagttttcccagatgctttcattatgttccagcatctgctttcctctgttggatccatccatccattctttcatctttccatccatccacatgtacagatcgatctttccatctctttacctaccatccttccagtcatccctcattctttcatccatccatcctttcacctgtccatccacacatccactgacaattcctgagaattccatccgctcattcctccatccgtcttctcacctgtccatccacacatccactgacaattccattcagtcattcttccatccatccatcttctcacctgtccatccatgcatccactgacaattcctgagaatgccatctgctcattcttccatccatccatcttctcacctgtccatctacacatccaccgaaaattcctgagaattccatccactcattcctccatccatccatcttctcacctgtccatccacacatccactgacaattccattcactcattcttccatccatccatcttctcacctgtccatccacacatccactgacaattcctgagaatgccatccgctcattcctccatccgtcttctcacctgtccatccacacatccactgacaattcctgagaattccatccgctcattcctccatccgtcttctcacctgtccatccacacatccactgacaattccatccacttattgttccatccatccatcttctcacctgtccatccacacatccactgaaaattccattcactcattcttccatccatccatcttctcacctgtccatccacacatccactgacaattccattcacttattcttccatccatccatcttctcacctgtccatccatgcatccactgacaattcctgagaatgccatctgctcattcttctatccatccatcttctcacctgtccatctgcacatccactgaaaattcctgagaattccatctactcattcctccatccatccatcttctcacctgtccatccacacatccactgacaattcctgagaattccatccgctcattcctccatccatccatcttctcacctgtccatccacacatccactgacaattccattcactcattcctccatccacccatcttccatccatttacccatctacccatccatcttttcattcatccatccaactgttcttccatctatccatccacccacccattcttccttccctacatgcttccaatatacatgaagcactctggctagacatgaaccaaagcactgtctcccagtgaggaagtccagatatttcactagaaatggcagcttggaggacggaatgatgaaaaccaaggcgggggagcataatgcacacctgggagaggctggggagggtcttatttatttattcacttattgagacagggtcttgctctgtaggccaagctggagtatagtggtgtgatcacggctcagtgcagcctcaacctcccaggctcaagtgatcctcccaccccagccttccaagtagctgggaacatacccgcccaccactacacctggtaaattaaacaaaaaaaaaattttttttttgtacagacgaggtcttgctctgttgcccatgctggtcatgaactcctggcctcaactgatcctcctgcctcagtctcccaaagtgctgggattacaggcatgagccaccatgccagcctcctttatttagtcaacaaatacaatcctaggctccagagactaaagccaacccatttcctgctctcaaagaccccagatcccactaggattgtttggatacaaccttaggtaaaatttaagacagaagcacaggcaagaatcactgtcgttagaaggaaaacttcaaggaaaagttgtgtgtgtgtgtgtgtgtgtattttgagacagagtcttgctctgtcgcccaggctggagtgcagtggtgcgagcttggctcactgcaacctccgcctcccgggttcaagcgattctcctgcctcaccctcctgagtagccgggattacaggcacgtgccatcatgcccggctgatttttgtatttttagtagagacggtgttt[131 bp omitted]gccaggcacagtggctcacacgtgtaatttcagcactttgggaggctgaggagggaagatcgcttgagcccaggagtttgagaccagcctgggcagcatggtgaaatgccacctctataaaaaatacaaataataagttggggagggtggcgcatacctgtaatcccagctacttgggtggctgaggcaggggaatcgctcgaacctaggaggcagattgtgccactgcactccagcctgggtgatagggcaagactctgtctcaaaaaaaaaaaaaaaaaacctaaataaataaaccaaataaactggaccttgataagtcagtagaatttggatttagtaagctaacgagtgggacagataagtattcaggaagattcccagggctctgtgtggggagggtcatttttggtgtcagaagaacttttttctttttttttttgagataaggcctcgctctgttgctcaggctggagtgcagtggtgtgatcttgacccactacagtcttgacctcctgggctcaagagatcctctcacctcagccccacaagtagctgggaccacaggcatgtgccatcatgcctggctttttttttttttttttttttttttgagacggagtttcgctcttgttgtccaggctggagtgcaatagtgccatctcagctcactgcaacctccgcctcccgggctcaagtgattctcctgcctcagcctcccaagtagctgggattacaggcatgcgccaccacacctggctaattttgtagttttagtagagatggggt[136 bp omitted]cactatgttgcccaggctggtctcgaactcctgggctaaagctatctgcccatctcggcctcccaacgtgctgggattacaggcgtgagccattgtgcttaggccagaagaattttacgggggaaatacacactaagatagaaactccccagatacacggtggcaatatatacagcattctacctcagctccccacccatgtttgtggtg[164 bp omitted]gcctcccgagtagttgggctctctatttttagta[153 bp omitted]caggctggagtgcaatggcgccatctcagctcactgcaacctcctcctcccaggtttaagcgattctcctgcctcagcctcctgagtagctgggattacaggtgcccacaaccgcacccggctaatttttgtatttttagtacagacagggtttcgccatgttggccaggctggttttgaactcctgacctcaggtgatccacccgcctcggcctcccaaagtacttggattacaggtgtgagccaccgcgcccggccttaattcatttttaggtattttttgagacagtctcactctgttgtccaggctggagtgcagtgggacaatcatagctcactgcagccttgagatcctgggctcaagtgattctctcgcatcagcctctgagtagctgtgcgccaccacaccaggctaatttatttttaatttttttatagggatagggtctccctatgttgcctgggctggtcttgaactcttgggctgaagagatcctcctgccttgacctcccaaagtgctaggtatagtacaggctgtggtagggtagaaagagcaagttatttttgctttggaatcagacaaaactgaatttaaataccagcttgggccgggtacagtggctcacgcctataatcccaacattttgggaggctgaggtaggatcacttgaggtcaggagttcgagatcagcctggccaccatggcaaaaccctgtctctactgaaaatacaaaaattagctggcgtggtggcgggtgcctgtaatcccaactagttgggaggctgaggca[148 bp omitted]cttgaggaagcagcttcccctctctgagccccagtttctctctgtggaaagtggagataatatcttacaggagtgttataagcctccatggcaaggtatgagttgtgcccggtcccggtgggggcccaataagagggatctcctcttaatatgattccatttcctctgggggtacatccttcaatataaggtaactctcagtgggcaaatctgattcactctgcggaagttaactcagcagcctcctgggagaaaatacggcagctctgcaagatgtggtttgagggggtggtgttgtaagcccagcaggagtggaagtgatcacagtccactgggggaactggagatggctgataggcttggggatagcagagttgaatggatggaatttcagcaagaaagaag[134 bp omitted]agcctcccgagaagctgggactacaggcacctgccactatgcctggctaatgtttgtatttttagtagagatggggtt[132 bp omitted]gcaggcccagtgctgggcagttggtgtactcttttgcccttcatctcccttccctgcctgcaaggattatcaccccattttgcagatgaagagactgaggctcagagagaggaaaaatggcttgcccagggtcatccagctagtagcaggggtcaggcttttcatgtgagtctgtataattctcaagcccattgcaaggggcatgtttggagagaggtcagaggctcgcagggttggtatgtatcattggcatgaagggagtgttggagacaaggccagtgaggcaggtagggccaaaccacccaggacctcaaatgccaggcagaggggctaaggctgtccttgagaggcagcagaggaccagggtccgttatgtggataaaaaagactctctggccaagcgtgaaggctcatgcctattatcacagcaccttggaagactaaggaaggaggttcgcttgagcccaggagtttgagaccagcctgggcagcatagtgagaccccatgtctataaaaaattagctgggtatggtactgtgcgcctgtagtcccagctactcgggaggctgaggcaggaggatcgcttgagcctgggaggtctcaaagctgaagtgagctgtgatggcgccactgcactccagactgggtgacagacgaagaccctgtctcaaaaaacaaaaacagactctctgggagtgggtgggggcagagtggagaggagagaagagactgcagtgatggtgtttgggggtgccgaagcttgagctatagctggggccaggaggacagtcggggaggctcagcagagagtcaggaggctggacgtgggacatgaagcttgggggctgatggcctgtgagatgggaggagcaggaagggacaaggacagtacctgcgggtctgccttattgattgggtggacagaggggccattcctgagatgaggacgtagggaagatgggtttgagggctagatgctgagttgagtatggaacacggtgagtctgaagggacaaggtggggccagggtcgagtgcccaggtgacaaatggtgccagattaaggcggaatataaagcaaggtattattattattattatttttatttttttattttttttgagatggagtcttgctctgtcgtccaggctggagtgcagtggcacgatcttggctcactacaagctccacctcccaggttcatgccatcctcctgcctcagcctcctgagtagctggcactacaggcgcccgccaccatgcccggctaattttttgtatatttagtagagatggggtttcactgtgttaaccagggtggtctcgatctcttgacctcatgatccacccatctcggcctcccaaagtgctgggattacaggtgtgagccactgtgcccggcctattattattatttttgcaacagagtttcgctctgttgcccaggctggagtgcaatggcgtgatcttggctcactgcaacctccacctcccgggttcaagcgattttcctgcctcagcctcccaagtagctgggattacaggcatgagccaccacgcccagctaattttgtatttttagcagagacgaggtttctccatgttggtcaggctggtctcgaactcctgacctcaggtgattcgcccacctcggcctcccaaggtgttgggattacaggcatgagccacagcatccagcctattattattatttgagacggagtctccctttctcacccaggctggaatgcagtgacgtgatctcggctcactgcaacctccacctcccgggttcaagcgattctcctgctcagcctcccaagtagctgggactacagacgcatgccaccatgcccagctaattttttgtattttagtagagatggggtttcaccgt[137 bp omitted]ttgaaactgtggggaaagtaggagagcttcatagaatcgtagaaagtcgtggaaaagtccgctctgaatggacgtctgggttttgaaagagcacagaaagccatgaggtcctagacatgttactgcctttctgggcctctgtttcctcaagcacagccttggaggttacactggccaagctgtagtgtcgccacagcgtggaacttcttcccacagttactgtaattgattacagtgctatgaagggggtgccactatttcccatttaatagatgaggaaactgaggctcccaaggttcaatggcttgcctgaagtcactcagttggtactggtggaccggggactggaacccacgtctgcctgccccagagcctattgctcacctccactacatgagattatctctttctgtggtaccagtttttggagcaaccaaaatgagatgaatttgttttggagatagatatggagcaagtggaggcagaaggaaacctaactccatgtcacgacaaatgcccttcaggacttttcatgcccctgttgactgcacatgtttggatccactacatagctggatcaaatttttaagggtttctggttctctcttgctgtttcagtgacctccagggtctctcggagtccctctcctgttctcattttctgctgttgtcacctctttcccttcacaatataccccaagtttcagaaatcagagtgactcacgtttgtcatcatctgctgtgtgtgtgtgtgtgtgtgtgtgtgtgtgtgtgtgtgtgtgtgtgtgttgcacccgggcctttgcttctgctgtgcctgctgctttgaacgcccttttcgcaccttaggggcatacctcccagtcctggtggtctttcaaagtgctacctcaacacccattctctgggagctctcttgggccactctatacctctgtgaccatatcctcctctgggccctaatcatattatatgcctatagatgcctccttagacacccctccaccctgccttccattatggcctgtccagccttccctttaatcgcccatccatctctgattgtccgtctgccccatcttgtttcctctctccccatccatccgtctgtccatctatccatctatccaccctgtacatccatctatccatccatccgttcattcatccatctctttatcctttcatccatccatttatccatcccatccatccatccttctatctgtccatccatccatcctaatcatattatatgcctacctctgagggcaccaagcaccctgagggtagttatgtgttggggggacatatttcccccaatagaaccagcttcttcagggtaggaactgtatctgatttctctctccatccctcccactgcttggtccataacatacctcaataaatattaaatgaataagtgattccttttgtttcttcttgggggctgtaaaccagtggtctgtgctctggccctgagccaaatgaccttatgcctatgatagcctgactgctttaagacccccacactctgcccagtagcaacccctttatgcagagtttaaaagtcagacatgcaaaatagaggcaaaatagacattcagcagatgtccctcctcccctgacttcttgtcccctctccctctaatccttccagcctgtgggagctcggaggcctcagcctacctggatgagctgcgtttggctgtggcttggaaccgcgtggacattgcccagagtgaactctttcggggggacatccaatggcgggtgaggggtcagggcctgggggttgggcatactgacaaagggactgtgctgtcctccctctctgccttctttttttttttttttttttttgacggagtctcactctgtcacccagcctggagtgcagaggtgtgatcccagctcactgcaagctccgccacctgggttcacgccattctcctgcctc[134 bp omitted]caggctcccaaagtgctggggttacaggcatgagccaccgcacccggcctctctgccttcttagacgcccctcaaccctgccttccattatggcctgtccagccttcccttaattgtccatccatctctgtccatctgccccatcttgtttcctctctccccacccatccatctgtctatccatccatccaccctgtacctccatctatccattcatccattcattcatccatctacttatccatccatccatccatttgtccatccatccatttatccatccatccatccatccatccatccatccatctgtccatccatccatccatccatccatccatccatctgtccattcatccatccatccattcatctgtccatccatccatctacctatccattcatccatacatccatccatctacctatccattcatccatccatccatccatctatccatccatccatctgtccatccattcatctgtccatccatccatctacctatccgttcatccatccatccctctgtccatccatccatccctctgtccatccatccatccctctgtccatccatccatccatccatccatccatccatccatctgcccatccatccatctgtccatccatccatctacctatccattcatccatccatccacccatccatccatccatccatccatccatccatccatccatccatccatccgtccctcatacccttgcccatctcttgtccttaacctttgagctaatctcttcccctattcatcccaccctgccagtccttccatctcgaagcttccctcatggacgccctgctgaatgaccggcctgagttcgtgcgcttgctcatttcccacggcctcagcctgggccacttcctgaccccgatgcgcctggcccaactctacagcgcggcgccctccaactcgctcatccgcaaccttttggaccaggcgtcccacagcgcaggcaccaaagccccagccctaaaagggggagctgcggagctccggccccctgacgtggggcatgtgctgaggatgctgctggggaagatgtgcgcgccgaggtacccctccgggggcgcctgggaccctcacccaggccagggcttcggggagagcgtaaggaccgggcaaagctggggggcccccccgcgcgggaaggacctgggggcgggattacatcagggatggggcgtggccaaaccagaggcagggctggtggtggccagtgttggggaggggctggtcctcaccacccctccttttgctggcagatgtatctgctctcggacaaggccacctcgccgctctcgctggatgctggcctcgggcaggccccctggagcgacctgcttctttgggcactgttgctgaacagggcacagatggccatgtacttctgggagatggtgagtgctgacttggcgctcctgcatccctgtcctttaggccactggatgccagtgttcccgaaacaattaccatacaattccccgacccctgacgtcacctgacaggcgccccatcctccgtcgctgatatatgcctccaactg[137 bp omitted]aagtaattctcctgcctcagcctccggagtagctgggattacaggcacctgcccccacgcctggctaatttttgttttgttttgttttgttttagtagagatggggtttcaccatgttggccaggctggactcctgacctcaagtgatccacccgcctcggcttcccaaaatgctgggattacaggcatgtgccaccgtgcctggccaagattctctctttgttttggcctttgataatatatctcagtgtggatctctgtgaatttctttttctttttcttttttttttttttttgagatggagtcctgctctgttgcccaggctggagtgcagtggcatgatctcggctcactgcaagctccaccttctgggttcatgccattctcctgcctcagcctcccgagtagctgggactacaggcgcccgccaccacgcccagctaattttttgtatttttagtagagatggggtttcaccgtggtcttgatctcctgaccttgtgatctgtctgccttggcctcccgaagtgctgggattacaggcgtgagccactgtgcttggcctgtgaatttcttttacttggagttccttgagcttcctggatgtgtagacttttgtctttcatcacattttggaagtttttaggacattatatcttcaaatattatttctttccctttctgtctctcttttccttttggactctcattatgtatgtattaatattctgtatggtgtctcgcaagtcccttaggctctgcttattttccttcatttgtttttcttttttctcctcaggctggataatctcaatgtacttagcttcaaattcactgatctttattttgccttttttatgaatctactgttgagtccctctagtggtttttatatttcagttattgt[142 bp omitted]tgcctcctgggttcacgccattctcctgcctccacgccattctcctgcctcagcctcccaagtagctgggactacaggtgcccgccaccacgcccagctaatttttttgtatttttttagagacagggttt[141 bp omitted]aactttatttttgattacagtaccattctcaatctcttctacaaaaagcagaaaaaaaagcagccacttcactcaagacctatatacagataagatgttttctgtgtttttttcttttttttttaatttttatttttaaaaaaataaattcagtgttcacatttctataaagaattaacccagtttcaggaaaccctgcctctatctctgtattcttattctctaggtggtgagacatctttttcctggctccctttagttcttttttcatgatttcctttagctcttcgagcatatttaagacaatttatttaaagcctttgctagtaagttcagtgtctgagtttcctcagggatagtttctattcatttatttttttcctactcatttctattcatttcatttcttttcttttatttatttatttgttgttcttgttgttgttgttgagacagagtctcattctgtcactcagactggactgcagtggtttgaccaaagttcactgcaaccttgacttcttggactcaagcaatcctcccacctcagcctcctgagtagttgggtctaccagccacatgccaagctaattttaaaaaatttgcagagatggggtcttactatgttgcccaggttggtcttgaattcttgggctcaagcaatcctcctgcctgggcctcccaaagtgctgggattacaggtgtgagccaccatgcctggtctctattaatttcttttttttccagtatatgaaccatattgtcttgtttctttgcatgcctcataatttttggttgaaaagtggaacattttgaatatgataatgtggcaactctggaaatcagcttatgccctccctccagggtttgttgtggctgctgctcattgtgggtcattgttgtttgtttagtgacttttcttttttctttttcttttttttggggggaggggggatggagtctcactctgtggcccaggctagagtacagtggtgcaatctcggctcactgcaagctccacctcccaggtttaagtgattctcctgcctcagcctcccaagtagctgggattacaggtgtgtgccaccacacccagctaatttttgtatttttcatagagacggggtttcaccatgttagccaggctggtctcaaactcctgacctcaggtgatccacccaccttggcctcccaaagtgttaggattacaggcgtgagccaccgcgcccaccctgtttagtgacttctctaaaccttttttggaaagtctgtattctttgcatgtgtggccatggaagcccctcttctgttagcttagtggtctgctggtgacttgacagagatatccttaaatgcctagaaccacagaagcaaatataacaagaaactccctataagtgctgggattagaggcatgagcgacgcccaccgtggctgtatattgaagcagtctttcaatacttagccaagctgtttacagttctgctttagtcttcacttcctgcttgtgcagagcctaaagttcagccagatgtaagagcttcaggttttctctggtattttctgagcacgcctctagccctagtcatgcatctagccgtctggatttcctggtacacaaggaagactttcaaagcccttattccctccaagtatttcctttcatggcctctttcttcccaagatgcttagtgtatctattactgcctctactgtgagtccttgcctcagatggatgtggtt[132 bp omitted]gaaaccctatctctactaaaagcacaaaaaattagcctggcatggtggcgcatatctgtaattccagctactcgggaggctgaggcaggagaattgcttgaacctcggaggcagaggttgtggtgggctgagattgcagcattgcactccagcctgggcaacaagagtgaaactccgtctcaaaaaaaaaaaaaaagattttaacacacactgcctggaaagccactttttctctggggaaagctctaaggcaggtgaagcaaagtcaagtccttgagctgttgcttcagggagccaccagatagggccacacacacaaccacaattctggagggtaagtctgaattgctccctctagtactagcgacccacaccaggaatgtgtgtctttgtcttcaaggttgccactgaactggggagctgggggtagtaagtgggtaggttaaaatgtcacagtaccctcttactgaaatttagtggtctcttcattaagcattttcttgtttttttttttttataagttttcgattagattccagaattctagaaaagttgattctgacaacttttgatagctattgattgcttttgtggagggataaagttttgaagttccctacactggcatttttggtcacctctccaagggcttttaaaaatttcattgttagagacagggtcttcctcagtcatccaggctggagtgcagtggcatgatcatggctcactgcagcctcaacctactgggctcattcgatcctcctacctcagcttccctagtagctgggactacagaagcagaccaccacgcctggctaactaaaaaaaaaaaaattttgtagagatggagtctcaccatgttgcctggctggtcttgaattcctgggctcaagcaatcctcctcatttgtaaccacccaatgggttcacgttgcccgctgcctagacagagccgatttatcaaaacaaggaaagtgtaatggagaaagagtaattcgcgcagagccggctgtgcgggagacctcagttttattatcactcaaatcagtctcctcgaggattcagggatcagagcttttaaagataatttggtgggtagaggcttgggaagtggggagtgctgattggtcaggttggagatggaatcacaggggttggaagtgaggtttttcttgctgttttctgttcctgggtgggatggcagaactggttgagccagactacagtctgggtggtgtcagctgatccatccagtgcagggtctgcaaactatctcaagcactcatcttaggtgttacagtaatgatgttatccccaggagcaattgggggagccagaggctgcgtgacccctaaacttaatttctaatcttgtagctaatttgttagtcctgcaaaggtagactggtccccaggcaagatgggggtctttggggaaagggctattatcaatttcgtttcagagtcaaaccatgaacagaattccttcccaaagttagttcagcctatgcccaggaatgagcgaggacagcttaagggttagaagcaagatggagtcggttaggtctgatttctttcattgtcataattttctcagttatcatttttgcaaaggtggtttcacttcagcctcccaacgtgctgggattatagtcgtgagccactttacccagcctccaactgcttcttgacctgtctgtgactgctgaattgattctaactgcagcccagcccctgacttgcatccctggtctctgaaccacctgacttctggcattttcaactgactttcagtttcttccagatccatctccaaacattacttcatccttggcctctgatgaccccagttagtttctgacctctgactctgttccttcccttgacttcaggcttcctccccctctatgaaccctctttgacgcatccgtgccctctttgtctctccagggttccaatgcagtttcctcagctcttggggcctgtttgctgctccgggtgatggcacgcctggagcctgacgctgaggaggcagcacggaggaaagacctggcgttcaagtttgaggggatgggcgttggtgcgtggggcacggtgcctgggagcagggacgggggctgccgccagagggggatgtgcaactccgcactcctcacatatccctgcgccatccccttaaattcccttacctctcccttcacaccctcaccctactccttcccatccctgtcacataactaactcctctgccccagacctctttggcgagtgctatcgcagcagtgaggtgagggctgcccgcctcctcctccgtcgctgcccgctctggggggatgccacttgcctccagctggccatgcaagctgacgcccgtgccttctttgcccaggatggggtacaggtgagtatctgcgacaccaacatcccaaacagtctccaagtggactctgggaagtatggggatgagcccctgccattgggaacatctatggtcttgaccagccactctccctggagatcccccagaaagtctctcttctctctcagaaaggctgctcttcccataagaagccccgctcccttccaccaaaagccaaccttcccacggcaaagcccatcttcctaaaaagttccactccagatagagaaactccttgtgaccctgtcaggaaattccacctttaaccttggaagtccttcccgctttcagggaagagtccatttctttcaaaggaagtcctagctcatccacaggaagtcctacggcatccacaggaagtcctttccacttcctttagaggtccctagtttcagttttcagcagttagaatggcctcactgaacaattacctttttttttttttggacataaacaaactttggtctaggaaatctcacccttcctataggaaatcatctgccttgggaagccctacttgctcccacagtctctccgatcctgacaagttgacattttggaaacattatcaatatttttagtttaaatctgacaggggctcagagtcccactttagtacaggaagttgtgcccaacaggaagtcccatcctcatctgttggaatggtttggctgacatttcaaacagctacccagagtcccttgctgtggatagtggttaaactcatggattccagctctaccacatacaaactgtgtttctttgggccgtttccttaacctctctgtgcctcatgtgtaccaaggaggagatactagtacccacccccttatgtgtcaagggttcggtggactaatctacataaagtgcttagccctgtatctgccatatggtgtcaatttaagtgttgactgtttactgccaaaacctggcctaagttgtctttgcctttcaccaccgtttccctacctcaatagttgtggctgtgacattgggcacttgctctgtactctggagctgcagtccaacccttgctgggcgtcttagggacggggctgtgggggagatttggatcctaatccttcccaccccccacagtctctgctgacacagaagtggtggggagatatggccagcactacacccatctgggccctggttctcgccttcttttgccctccactcatctacacccgcctcatcaccttcaggtcagtaccctggggtgagagtggtggggatgggggcggggtgctcagtttctccttcctgccccctctgcccacctttcttccctcatcggcccattgtgtcccttccctaggaatgggactctctgtccctccactaagggagtgctgtgggaggtgagttttgggggggatcctccctgtggtatctctagtggcagttactctgcctttctggccatggctctgggggaaggtccctttgggatgactttaggagaccacctctctgtccctctgccatgtctccgggtgaagaagtttgagttttgctggagaatgcctctccaccttctcttcccctcatttcttgctctgtgcttccccccttgctaggaaatcagaagaggagcccacacgggaggagctagagtttgacatggatagtgtcattaatggggaagggcctgtcgggtgagtggagcctccagcactgtgtgaggtggggacaccctgggcagttcaggacatgtgccagttccacgttgtgttagtcccctcttgagttgctacaaagttgctaaacctgagactgagtaatttataaagaaaagaggtttcattggctcatggttctgcaggttgtacaggaagcatagtgctggcatctgcggctggtgagccctcaggaagcttccactcatggcagaaagtgagggaggagccagtgtatcacatggcgagagcagaagcaggagtaggggtgccacatagatctcatgtgaactaactgagcaaaaagtctccaaagggatggtgctgagccatttgtgaaggacccaccaccaggacccaaacacttcccccaggccccacctccaacattagggattacatttctttgttctttttttctttttttttgatacggagtctccctcagttgcccaggctggagtgcagtggtacaatcttggctcactgcagcctctgtttcctgggttcctgatcagcctgcctcagcctcccaagtaggtgggagtagaagtgcatgccactacgcccagctaatttttgtatctttaaagtagagtcgggatttcaccatgttggccaggctggtgtcaacctcctgacctcaagtgatccgcgcactttggcctcccaaagtgctgggattacaggtgtgagccaccgggcccagccagggattacatttctttctttcttttttgaaatggggtctcgctctgtcgaccaggctggagtgcagtggtgtgatctccgcctcctgggttcaagcgattctcctgcctcagcctcccgaatagctgggactacaggagcccaccaccacacctggctaacttttgtacttttagtagtgacagggtttcatcacattggccaggctggtcttgaactcctgaccttgtgatccgcccgcctcagcctcccaaagtactgggattacaggcatgagccaccatgcctggcccagggattacatttcaatgtgagatttggaagggacaaacatccaaactatatcacacgtcccatcagggactgagatactgaggaagcttcccaggtgccaagctcaagacttggctcaagatttggttctgccatcaaggaggccatcaccagaaattgattttcttcatgctacacatacttccatccctctgtagcaagcggaatcagttgattgagggatttttcacctattttgttcgtggtcccaaggcccctgcttttaatcactatgctatggttgccgttaaggtattttaaaagtcaggcctaagcaaatgaaatagaatatttatcaaacttctttttttgttgttgtttttgaggcggagtcttgctctgtcgccaggcaggagtgcggtgccgcgatctcatctcactgcaacctccgcctcctgagttcaagcgattctcctgcctc[136 bp omitted]gcctcccaaaatgctgggattacaggcatgagccaccatgcctggcctatatatagttttttaagacaatgtagagaggatacaaaatatttatctgtagccataaaaaagaacgagatcatttcctttgcagtgacatggttggagctggaggccattatccataacaaactaacaggaacagaaaaccaaataccccatgttctcacttataagtaagaactaaatgatgagaacacatggacacacagagtgaaacaacacacattggggcctattggaggacagagggtagggcgagggagaggaccaggaaaaataactagtgggtactaggctaaatacctgggtgatggaataatctgtacaacaaacccccatgacacaaatttacctacctaacaaacctgcacatgtacctctgaactaaaaataaacgtcaaaaaataaaaaaaagaacaaaatatgtatcaagagagaagggaaaaactaagataaacatttggaccactgagaaaggttgatagaaggccccagtgtctgaggtcaggatcagtaatggtgtccttccctagcaatttctcatctgcacatgtgatgatgatgacgaccttgataacagctgatgttatgaaacacgtacaatgagcaactactgtgctcaattcttttgaaaatcagttggttttttttttttttttttgagatggagtcttactctgtcgcccaggctggagtgcagtggcatgatctcggctcactgcaagctcctcctcccgggttcacaccattctcctgcctcagcctcctgagtagctgggactacaggtgcccgccacc[172 bp omitted]cccagtgcaatagggcctataattattctcattttgcaggtgaaataatggagtcattcagtcacttgcctcagatcatgtggttggtaaatggtagagccgagatttgatcccagatcctcttgtacctgagtctgtgctctcagcccctgtggagcccccccactgagagctctgttgaaggacagatcccaagatccccccagagaggctggggctgagcccaggaacctgcctgtggcctggctggaggtgattcaagatggcagatgtgggggaagctttctgacccaccgctctcccttcttaccaggattctgcaggagaactgtgaaataccatgatggttttctctatcagtagggagcttgctgtcctctctgcatctgaccttctttctctaggagttcttagtttctgtagctttcactattctcctccttctcctcctccttctcctccttgtcctcctccttgtcatcctccttctcctcctcctcgtcatcctccttctcctcctcctcttcatcctcctcctccttctcctcctcttcctactcatcctcctcctcttcctccttctcctcatcctctttctcttcctcctcctcatcctcctcctgctcctgctcctccgccttctcctcatcctacttctcctcttcatcctcctcctgctcctgctcctccgccttctcctcatcctacttctcctcttcatcctccttctcctcttcctcctcttcatcctcctcctcctgctcctgcttctccgccttctcctcatcctccttctcctgctcctcctcctcctgctcctctgccttctcttcatcctccttctccttctcctttcttcttctttgagacaggatcttgatctgtcactcaggctggagagcagtggcgcgatcatggcttactgcaccctcaacctcccaggctaagccatcctcccacctcagcctctcaagtagctacagatgcatgctatgctcggctaatttttatatgttttgtagagatggggtttcgccatgttgcccaggctggtctcaaattcgaaggcttaagtgatcttcccacctcggcttcccaaagtgctgggattacaggcatacaccactgcgcttggcctcacttatttccttccttcctccttccttccttctttccttccttcctttcctttccttttctttccttccttcctttctttccttccctttctttctctctctctttctctctctgtccctccctcccttccttccttcttttcttccttccttcctccctctcttttctttctttctctatctccttccctccctccctctctccctccccccaacccttccttcctcccttctgagacaaggtctcactctgttgcctccgctgaagtatagtagcttgatcttggctcactgcagcctcaacctcccagtgtcaagtgattctcctgcctcagcctcctgagtagctgggactgcaggtataaacacacctggctaatttttttttttttttctgtagagatggggtttcaccatgttgcccaggctggtgttgaactcctgggctcaagcaatctgctcaccttggcctcccaaagtgctgggatttcaggcttgagctaccacgcccagcctcacttttttttctttttttttaaatggcagctttattgagctgtaatccacatatcataccgttcacttacttaaggtatacaattcagtgcttcttggtgtactcacagaattgtgaaatcatttccacaattcattttcaaatattgtcatcactccaacaagaaactctgtacatgcttagcactgcttttcgttttcccagccctaggccaccattcatgtacctgctgtctctgggtttgcctgttttgcacacttcacataagtggagccatgcactctatggtcttttcttcttcttcttctttatttttttattttttgagacggagttttgctctcgttgcccaggctggagtcaatggcgcgacctcagttcaccacaacctccgcctcccgggttcaagcgattctcctgcatcagcctgtcaagtagctgggattacaggcatgcgccaccacgccaggctaattttgtatttttagtagagacggggtttctccatgttggtcaggctggtctcgaactcccgacctcagctgatctgcctgcctcggcctccccaaatgctgggattacaagcgtgagctagcgcgcccagcccgtttctactttaatttttttttttttttttttagacagggtctcgctctattgcccaagctggagtgcagtggcatgttcatggctgactgcagcctgggcctcctgtactcaagtgatcctcccatttcagcctccccagtagctgggactacaggtgcttgcccctactactggctaaatttttatttttatttattttattattattattattattatttttgagacagagtctcactctgtcgcctaggctgcagtgcattgcaacctctgcctcccaggttcaagcgattctcccgcctcagcctcccgagtatgtgggactactggcatgcgccaccagacccggctaatttttgtatttttagtagagacagggtttcaccatgttggccaggctggtctcgaactccctacctcaggtgatctgcccgccttaactcccaaagtgctgcgattacaggcgtgagccaccgcgcccgatccgggtatatttttaaaatattttttgtagagatgaggttttgccatgttggccaggctggtctccaactcctcggctcaagcgatcaatccacctcttgaccggagatttcagaggtcagaggttagatacaagagtcaaaacccaagaaattagctctgggcagactgagtttcgggtcaggcagggtgagatgtgccaagccaaaagtctcgatgatggtggagatcaggactcagaggtcagagtgaggcctcctcccttctcttctcttcccccacaggacggcggacccagccgagaagacgccgctgggggtcccgcgccagtcgggccgtccgggttgctgcgggggccgctgcggggggcgccggtgcctacgccgctggttccacttctggggcgcgccggtgaccatcttcatgggcaacgtggtcagctacctgctgttcctgctgcttttctcgcgggtgctgctcgtggatttccagccggcgccgcccggctccctggagctgctgctctatttctgggctttcacgctgctgtgcgaggaactgcgccagggcctgagcggaggcgggggcagcctcgccagcgggggccccgggcctggccatgcctcactgagccagcgcctgcgcctctacctcgccgacagctggaaccagtgcgacctagtggctctcacctgcttcctcctgggcgtgggctgccggtgagtgccccggggccttggaaccctggcccctggccacctctcatccttcctgcccactcccggggtctccactcccggcttccccgcagctgggcagcaggtcaagccaaccctgctgattgagaacccctcttaggaaagtcgggcatgacgattgccccagggtaattggctggcacctggagatctggcttcagggacggcaggattcaggagaaaaccccactgtccgccactcagcctctgctgctatttattgctaggcctgaagtttaacagatatttatgggagcgccccgacctgggtgccaacctcacctcctcccttctcttcctccacatagctcgttggtcccaggccccttgccctcctgcccccgactttttctttctttcctttttttttctttctttctttctctttctttctttttctttctttctttctttctttctttctttctttctttctttctttctttctttctctctctttcttttctttctttctcttttcttttcctttcttttctttttctttttctcttttctttctctctctctccctctgtcctctgcccctctgcctccctccctccttccttccttccttccttccttccttccttccttccttctatgcttccttccatccctccaagctaagggtttaacccttgccctgcctgcattatggagtatcctgcattaggatactcctccttttgaggagagcaaacagaaaagtttgtggatacaacctggtgactggttttttgtttgtttgtttgtttttgttttctttcttttcttttttttttttgagccagagttccgctgtgtcgcccagactggagtgcagtggtacgatcttggctcactgcaacctccacctcctgggttcaagcgattctcttgcctcagcctcgtgagtagctgggattacaggcatgcaccactacacctagctaaattttttttgtattttttttgtagagatggggctttgccatattgaccaggctggtcttgaactcttggcctcaagtgatccactggccttagcctctgaaagtgctgagattacagatgtgggtcaccgtgcctggccaacaacctggtgactgtttacaagggacctgacacatcctgaatggttgacagtgatgacagtgatgatccctactcaagcttttcccagtagacacgctgagaggcaggcttcctctaagctatgttagcagtgttacaaagtgattcaacataaataatttattcaagcagggagcaagatatgagagttttgcagaacactaatacttctgtttgtaatttgttgtattttgtataaagtgacttttgagatgaaagggctaaggccatatgctaccatgctctaggattgccagtgatattttggacagtttatcaagcctaccactttccaggtgaaaaat[144 bp omitted]tctactaaaaatacaaaaaattagccgggcatggtggcaggcgcctgtaatcccagctactcgggaggctgaggcaggataattgcctgaacctgggaggcggaggttgcagtgagccaagatcatgccactgcactctagcctgggtgaaaagagcaaaactctgtcaaaaaaaaaaaaaaaaaaaaaagggagaaatgtctaatcatctccggaattgaatggatgaatcatcctttgtttcgccagttccctctagatggacatttaggttctctctttctttctttttttgttttaaatagagacagggtctcactctgttgcccaggctggtctcaaactccagggctcaagcaatcctcccaccttggcctctcaaagtgctgggattacaggcgtgagctactatgctcagccttctgtttttttattattccaaaataataaaagtttacatcccagatgtaaagtttatgggtcaaagggtacatttatttttgacatggatagatttccttctaagtagcttcactcatttccacacctgccatcagggtaagagagtgcccccttgaggccatgctcgacaatgcctgatactttcactctaaaatgtagctctcaatttaactgaaaaaaaatttgccaatttaatgggtaaacatgacctctccttgttataatttatgcactcttgactaccagataggttggacatcttttcctaagcttaatggccatatgtccttgtgcccccttgttttttttttggtttttgtttttgtttttgtttttgagacggagtctcgctctgtagcccaggctggagtgcagtggcgcgatctcggctcactgcaacctccgcctcccgggttcacgccattctcctgcctcagcctactgagtagctgggactacaggtgcctgcctccacgcccggctaattttttgtattttgtagtagagacggggtttcaccgtgttagccaagatgttctcgatctcctgaccccgtgatccgcccgcctcggcctcccaaagtgctaggattacaggcgtgagccactgcgaccggccaccctcccgtttttttaattggggttcattgatttgtatatgtataaatgtatatactccttatactctggatcctaatcctcggtagttttgttggtcttaatatcttcatatcttctcgaagtctgtggcttgtc[145 bp omitted]gatgcaaaataggggtagaatttttattttccccataggaattattgatgtttactggccgtttgaacgtcctctgtgaattgtacgtggtatcctttatctggcttccttccttttgcgtattagtttgtaaggactctatatgttttgccttttataggttggacagatattccggcagtttttccagcttgattcttacagggaccagctctttgctaaggccatcgttcattcagtcattacttaataggcgcagccattttaaaaatgggtgccagggccctgcatggaccagcttggtactgaataaatttgagtaaaccccgggtgactgggagggtcctggtcctgcccggtggaggctgcagcttcctctgaaggatggcattgggaagacttccattttccttggcgtcttgtgacacttgacccttgtggcatctccccacaccccaggctgaccccgggtttgtaccacctgggccgcactgtcctctgcatcgacttcatggttttcacggtgcggctgcttcacatcttcacggtcaacaaacagctggggcccaagatcgtcatcgtgagcaagatggtgaggcaggggcggggccaaagtgggcggggacatagggaaaggggtggggccagggagggagtggtccgtggagaaggggcgtgactttggggagcaatggggcgtgtttttgggatataggggtggggccagagtaggaaagggcggggccagactcagccacatctccccacagatgaaggacgtgttcttcttcctcttcttcctcggcgtgtggctggtagcctatggcgtggccacggaggggctcctgaggccacgggacagtgacttcccaagtatcctgcgccgcgtcttctaccgtccctacctgcagatcttcgggcagattccccaggaggacatggacggtaggggggatgacggcctgacagccttcctctgagtctctgtccccgctccctgggtctctgtcctcctggctctaagaaaatatctgtctctctgagtctctgtctccctctttctctggatctctgagtgataccctatattccccatcatcatctctctgggtctctgcctaccccaccccctctgtctttctgtctgtctttcttttttctttttttttttctttttttttgagatggatgttagaaatgtttattttgtggtgtcgtaaagaaatagtacttgaacataaatttaatttttttagtaaagccatttttattttttgtagaaagggtacactcgccagcagttttgtcatgagagtacacggaacaaaggagatagggtcatttataacctgacgcgtctattttactgctgtgtctggtttttattggctggaaccggactttacattttgtatttgtcttgattggctagtaacttagaagtttttaaaagaagcgaaggcagaggagaacaaaggaaggaggaagtaacttgtggaatgttgagaaaggtaaaaacacttttaaataaggaagaggaacaggctatgatctaatgcttgcttgaaccagtataagtatgtcagggcaaatatttaggctaaattgtgagagctaagaacataaagtacattgatttattttttatggctagtagatatttaagaatgttagcacaggtgtttgaataaattttgtttctaagagaagttactatttattgttaattagatggggaggaaagtctttgaagaggaacctgtactttactttttacatggagttttgctcttgttgcccaggctggagtgcaatggcacgatctcagctcactgcaacctccacctcccagatcgaagcgattctcctatctcagcctcccgagtagctgggactacaggcgcgtgccaccacgcctggctaacagttttgtgtttttagtagagatggggtttcatcacattggtcag[132 bp omitted]tctgaatgtctctcttcacagtggccctcatggagcacagcaactgctcgtcggagcccggcttctgggcacaccctcctggggcccaggcgggcacctgcgtctcccagtatgccaactggctggtggtgctgctcctcgtcatcttcctgctcgtggccaacatcctgctggtcaacttgctcattgccatgttcaggtgaggcctgactgctctctgatctgaccccacccagcatgacccgtggccctctcatgactcttgaaccccgtctaatgaattctgtttttagtccctgaactctgatccaatctaatgctgccttctccccaaacccaaccagaccctgcttgtaatttggactttggactgatcctctccctgagcccaggttgaacttccttatttgtatttttttgagacagggtctcactctgtcgccaaggctagagtgtggtgatgtgatcgtagcttactgcagcctcgacctcctggactcaagcaatcctcctgccttcgccccataagtagctgggactacttaaaattagccaggccagcaggcctgcctaatttaaaaaaatttttggagagaggggtctcactatgttgtccatgctagtctcgagctcctggactcaagtgatcctccctcctcagcctcccaaagtgctgggataatctgtcacctaggctggagtgtagtggcaagttctcagctcactgcaacctccacttcccactcccccatacccagttaattttttgtatttgtagtagagatagggtttcaccatgttggccttgaactcttgacctcaagtgattggcccacctcagcctcccaaagtgttgggattacaggtgtgagccatcgcgcccagccaactttgttttttattgtggtaaaattatataaaattttccatttttacttctttttttttttttttttttttgacggagtctcgctgtgtcacccaggctagagtgcagtggcacgatctcacaatctcagctcactacaagctccgccacccgggttcacgccattctcctacctcagcctcctgagtagctgggactacaggtgcccgccaccacgcccagctaatttttttgtatttttagtagagacggagtttcaccgtgttaacccggatggtctcaatctcctgacctcgtgatccacccgccttggcctcccaaa[132 bp omitted]tctcctgcctcagcctcccaagtagctaggactacaggcgtgcgccaccacacctggctaattttttgtatttttagtagagatggggtttcaccgtgttagccaggatggtttcgatctcctgaccttgtgatccgcccgccttggcctcccagagtgctgggattactgacatgagccaccgcggccggagttgatttttaccatttttaagtgtacaagtcagtgacattaattacatttacagtactctccaaccatcaccactatctattttcaatacgttctatcacccagaacagaaagtgtgtccccatgaaacagcaactccccacttcccctccccacaggtcttagtaacctccagtgtattttctgtctctatggatttagtctagatgtttcatgtaagtggaattatgcgatatttgtcttttggtgtctggctgattttactgagcatgttttcaaggctcatccctgttgtagtgtgcatcagaacttcattcattccgttttatgaatgagtaatattctattgtacaaatagaccacatttgggcccagcgtggtggctcatgcctgtaatcccagcactttgggaggcctaggcgggtggatcacctgaggtcaggagttcgagaccagcctggccaacgtggcaggaccccctttttactaaaaatacaaaaattagctgggctcatgtctgtaattccagctacttgggaggctcaggcacgagagtcgcttgaacccaggaggcggaggctacagtgagccaagatcgtgccactgcactccagcctgggcaacagagcgagactccatctcaaaaaaagaagaccacatttgatttacccgctcatctgttgatgaacacttgggttctttctgccttttggctattgtgactaatgtttgttggaacattggcatgcaagtatctatttgaatccttgtttttatttcctttgggtgtgtatctcaaagtggaattcctcggtcatgtggtaattctatgtatagctttttgagaaaccaccaaactggtttccacagcagctgcaccattttccattctcaccagcagtgtatgagggttttaatttctccacatcctagccaacacttgttattttccttttgtaaaaattatagtcatccagctgggtgtagtggctcatgcctgtaatcccagcactttggggggctgaggtgggaggattgcttgagcacaagagttcgagaccagcctgggcaacatagcgaggctgctgtctctaccaaaacaccagaaatgagataccacttcacacctgcagcctcaacctcctgggctcaagtgatcctcccacctcagcctcccaagtagctgggactacagttacgtgccaccatacctggcttgtttttttaattttttttttacttttattttatttatttatttttagtagaaacggggtttcaccatgttat[135 bp omitted]tgttaggtctctctgtttgcttcctttcttgttggcatgatttttgctgagaaaatataaaatttcattggctttggttgtttttttttttttttttttttcagagatggggtcttactatattgcccaggctgatcttgaacccctgggctcaagcagtcctcttgccttggccttccaaagtgctgggattataggcacaagcccctgtgctggacctattgtattagtttcctagggccgccagagtaccaaaaactgtgtggctttaaatcacagaaattgtctcacaattctggatgctagaggtccaaaatcaaggcatccgtcaagctgttttcttctgagggatgtcggggagagtctgttccatgcccctcctgtcacgtctagtgctttgctggccatctttggcttctagttgcgtcattgaaacttctgctttcatcttccagatttccccttttaataaaacgttacttaaattggattagggaccatgctaataacttcattttaacttgatcacatgtgtaaactctatttccgaataaagccacatatttcataaataaaaaatttaaaaaggtctcattctgaggcactatgggttatgacttcaacttttttttttttttttttttttttttggagacagagtcttgctctgtcacccaggttggagtgcaatggcgtgatctcggctcactgcaacctccacctcctgggttcaagggattctcctgcctcagcctcccgagtagctgggattacaggtgcctgccactatacacagctaatttttgtatttttagtagggacggggtttc[131 bp omitted]aattcaatgcatgacactcatagatttatgagtttatttctggactttcaattctattccactggattgcgtctatccttatgccagaaccacacagttttttgggttttttttgagacggagtctcgctcttgtcacccaggcgggattgcagtggcacgatctctgctcactgcaacatccgcatcctggattcaaacgattctcctaactcagcctcctgagtagctgggattacaggcacctgccaccacgcccggctaatttttttgtatttttggtagagacagggtttcaccatgttggccaggctagtcttgaactcctgacctcaggtgatctgcctcggctttccaaggtgctgggattacaggcgtgagccaccatgtctagcccacacagtgttgattactgtaggtttgtagcaaattttgacattggaagtatgagtctcctttgttatttttcaagattgttttggctattctgggcctcctgcaattctatatgaacttaaagatcagagtttccatgtctgtcaaaaaggttgttggaattttctttttttttccttttttttttttcttttttttgagacagagtttcactcttgttgcccaggctggagtgcaatggcgcgatctcagctcaccacaacctctgcctcccgggctcaagcgattctcctgcctcagcctcctgagtagctgggcttataggcatgtgccaccacgcccggctaattttgtatttttagtagagacagggtttctccatgttggtcaggctggtctcgaactcccgacctcaggtgatccacccgccttggcctcccaaagttctgggattacaggtgtgagccaccgcgcccggccagttgttggaattttccgagggattgcgttgaatctgtagattgcttcgggtagtattgatatttcatctaggtgttctttttaatgcttttccagcagtatttggtagttttcaggctacaaattgttcacccttttggttaactttattcctaggtgcttaacctttagatactgttgtaagtggaattgctttcttaatttcctttttggattgttcattgcgggtgtgtagaaacacaactgatttttgtgtgatcttgtaccctgcaactttgctgaatctgcagccctagaagctttcttgtgattctctggcatttcctatatataggatcatgtcatctgtgaatagagatatttttacttcttcctttccaatttggatgccttttattttttttcttgtttaattgttctagccagaacttccagcacaatgtggaatagcagtggtaaaagtggacatccttgtcttgtccctgatcttaggcagaaagctttcactctttcaccattgggtatgacggtagctgtgggtttttcagaagtaccttttctcatgttgagaaagtttatttctattcctagtttacgatttttaaaaattatgatgcatggtggcttgtgcctgcaatcacaatactttagggagccaaagtgggaggatcacttgaggccaggagttcaagaccgacctgggcaacatagtgagaccttatctcaataaaaaaataaaaaatttgccaggcgtggtggtgcatgcctgtagtcccagctactcaagaggctgaggtgggaggaaggcttgagcccaggaggtcaaggctgtggcttcagtgagccatgatttcaccaccatcatgattgtgccaccaacagagtgaaaccttgtctcaaaaaaaaaaaaaaaaaaaaaaagccatgcatggtg[131 bp omitted]tgcagagacaagagattgtagaaatgaagacacaagacaaagagatcaaagaaaagacagctgggcctgggggaccactaccaccaagacgtggagaccgacagtggcccctaatgcctggctgcgctgttatttattggatacaaagcaaaaggggcagggtaaagagtgtgagtcatctccaatgattgataaggtcacgtgagtcacatgtccactggacaggggcccttccctgttaggtagccaaggcggagagagagaggacagcttacatcattatttcttctatgctcttttaagaaagatcaaagactttaatactttaatactttcactaattttgctactgctatctagagggcagagccagctgtacagagtggaacatgaaagtgaaacaggagtgtgaccgctgaagcacagcatcacagggagacggttaggcccctggataactgcgggcgggcctgacatcagtcaggccctccacaagaggtggtggagcagtcttctctaaactcccccggggaaagggagactccctttcccggtctgctaagtagtgggtgcttttccttggcactgacgctacctctagaccacggtccgcttggtaacgggaatcttcccagatgctggcgttaccgctagaccaaggagccctctggtggccctgtccaggaataacagaaggctcacactctgtcttctggtcacttctcatcatgccccttcagctcctatctctgtatggcttggtttttcctaggttatgattgtaaagcaaggattattataatattgaaataaagagtaattgctacaaactaatgattgatattcatatataatcatatctatgatctatatctagtataactcttgttattttatatgttttattacactggaacagcttgtgccctcggtctcttgccttggcacctgggtggcttgccgcccacacatggtgaaaccccatctttactaaaaatacaaaaagttagctgagcgtggtggtgggtgcctgtagtcccagctactcaggaggctgaggcaagagaatggcatgaacccaggaggcggagcttgcagtgagccgagattgtgccactgcactccagcctgtgggacagagcaagactccatcaaaaaaaaaaaaaaaaaatcgtgaagtgttgttgaattttgtcaaatgccttttctgtgttggttgagaagatcatatggcttcccccacaccttgttctattaatttggtgtttgcattaatttttgtatgtttaactacccttactttcctaggataaatcccatttcgttatggtataaaatccacttaatgtgctgctgaattagatttgcttgtattttttcaggatgtttacatgtatattcataagggctactgctctgtaattttcttgtgatatctttatctggctttggtattacggtaatgctggcctcatagaatgagttaggaaatgttctctccttttcaatcttttggacgaatttgagaaacatccttgttattataattcttctttaaatatttgatagaattcaccagcacagccatctggttttgggcttttctttattgaaacgtttttgattcaatctcttatgataattctactgagattttctgttttttcttgagtcagcttagctaatttgtgtgttcctaggaatttgtccatttcatttatctagtttgttgacatataattgttgatagtattctcatacaatcctttttatttcggtaaggtcagtagtaatgtctccattttcatttctgatgttagttatttgtgtccaggctaactttggagcccaactttaacctgacttcaacctccaccttataccgtgataccatcccaacttgacctctgacatctgacccttggcccttctaaactgactttttttttttttttttttttttgagatggagtcttactctgtctcccaggctggagtgcagtggcacgatctcagctcactgcaacctccacctcctgggttcaagcgattctcctgcctcagcctccccagtagctgggattacaggtgcccaccaccacgcctggctaatttttgtatttttagtagagatggggcttcaccatgttagccaggctggtctcgaactcctgacctgaggtgatccgcccactccggcctcccaaagtgctgggactacaggcgtgaccaaacgcccttggctctaacctgacttctaatcgcatcctgtaacctctgactttagtgatcttgacttctgtctgctgctatagactgaacaattattgcctggcatctaaccttcgtccttgcccctggctgggccctgacctcaagtgacctttgacctctggcctttgcagttacacattcggcaaagtacagggcaacagcgatctctactggaaggcgcagcgttaccgcctcatccgggaattccactctcggcccgcgctggccccgccctttatcgtcatctcccacttgcgcctcctgctcaggcaattgtgcaggcgaccccggagcccccagccgtcctccccggccctcgagcatttccgtaagaacagagcttggcttaaaaaggagaaatataggggaccgggagcctggaaggcgaggggaagggggcatgccccaaatgactaacgggcgtggcttaggtagcgaggggcggggtttaagcaacaaggggcggagcttaagcactgaggggcagtgcttacgggtgaggggcggggcatgttctcgaatcaccaggggctgggtctgggatagcgtgcgtgttctgagggtgtcggaaggggcagctgggattgggaaggggcgtggcctgagccctttgactccgcccgcccctgcaggggtttacctttctaaggaagccgagcggaagctgctaacgtgggaatcggtgcataaggagaactttctgctggcacgcgctagggacaagcgggagagcgactccgagcgtctgaagcgcacgtcccagaagtgagagcggggcctggtcggggatggggcttctggcctggggcggatcctgacttcagctgaaggcagggtcctgggagggagggagagagggaggaggcccgggaagcaggcagagccctgggggtgggtgggctgcgggtgcccccggtaagaggccctcccttctcagggtggacttggcactgaaacagctgggacacatccgcgagtacgaacagcgcctgaaagtgctggagcgggaggtgaggccttggggcctggctgggggactgtggcaggggtcccatctcccgctctgacattcctcccattccgcaggtccagcagtgtagccgcgtcctggggtgggtggccgaggccctgagccgctctgccttgctgcccccaggtgggccgccaccccctgacctgcctgggtccaaaggtcagtgtgtagcatcagcctgtgcatctccagcctctgttcctgtatttttgcgtgtttttctctctcggcacctttccagtgtccctgggtcactctcttggtctcctttgagccttttgtactctcgccttcgtctttcttcttttttgccagtctcccagtttttctgtctctccccttccctgccaatcacctgctctctcttttctctcttcccccagactgagccctgctggcggacttcaaggagaagcccccacaggggattttgctcctagagtaaggctcatctgggcctcggcccccgcacctggtggccttgtccttgaggtgagccccatgtccatctgggccactgtcaggaccacctttgggagtgtcatccttacaaaccacagcatgcccggctcctcccagaaccagtcccagcctgggaggatcaaggcctggatcccgggccgttatccatctggaggctgcagggtccttggggtaacagggaccacagacccctcaccactcacagattcctcacactggggaaataaagccatttcagaggaatcgtgtccggaggcttgattcctgggggagctggtgggtgtctagatccaggatgggagctggagctggggtgttgggtttggggttcttggtggatttgctgctgtaattcagatattttggagtccgtttcctcccttgagccccattgttcttgccggagacccagcacttctgtctgcactgttctgacggctctcgcttcagtaggacaagaccccatctgtaccccctcccacccagtttcaactttccagtggaaaaataactcagtgataataagcaaattatttcctggaatggaggtgggtgggtgttgtgtacatctgctttggcaatagggaaacggatgatgcaaatttgagtagataaatgcatacgtgtctttaaaaagtctaattagtgggaaattgcaggccaggcgcacacagggttgaggcaaatatgtgtgattatacatgcagcttaactaaataacccataacaagctaaactggtaatgacaaggttgaactgacagcaatcattagttaaatagcaagaaagccaccaacaaccaacacatccaaaaatcaaaaccaaacatccttcctccaaattggaggagatccaagtatctgtcaccgtgggtgcagagtagcgttgaaacattgccaagtgttgtgtggcaactgcaacttctctggaagatgctgagttagttctcaccaacccaagtagtaataatcactgtaatgtaacctacttccttccttccttccttccttccttccttccttccttcctccctccctcctttcc[134 bp omitted]cctccgcttcctgggttcaagcagttctcctacctcagcctctggagtagctaggattacaggtgcccgccaccatgcccggctaatttttgtatttttggtagagacggggtttcaccatgttggccaggctggtcccaaactcctcatctcaggtgatctgcctgcctcggccttccaaagtgctggaattacaggtgtgagccaccacacccggccactttttcttcttttctttcaataaggtctcactctgtcacccaggcagaaatgcagtgactcaatcacagctcactgcaacctccacctcctgggctcaagcaattctcccactcagcctcctgagtagctggttctacaggctcacaccaccatgcccggctaattttttggatttttggtagagatggggtctcaccatattgccctggctggtctcaaactcctggggtcaagtgatccactcacctcggcctctcagagtgctgggattacaggcgtgagccaccgtacccggcctccagtactttctatatatgtgtgtccagcattgttttaagtgcttcacgtgcgctacatcagtgaaccctatgataaccatacaaggtaggttctattattgtctccattttgcagatgagaaaagtgagacacagaaaagtagctcaaataaagtcacacatagaaagtagctgagttgggggttgggcgtggtggctcatgcctgtaaaacagcactttgggaagccaagcaagtggatcacttgaggccaggagttcgagaccagcctggccaatatagcaaaaccccatcactactaaaaatacaaaaattagccgggtgtggtagcggacacctgtagtcccagctactcgggaggctgaggcaggagaatcacttgaacccaggaggcggagattgcagtgaaccgaaattgtgccactgcactccagcctgggtgacagagcaagactctgtttcaaaagaataataaaaaataaaaatggaaagtggctgcgttggaacagaaatctgggcaatccagagagcatctgtaatgcacgattttatatttggaaatgtcaactgccgtgaagtcacaggaactcactcagtccatgtgcaagtttgagcttttgtctctcagctgcaaatccacccttgcctccgctctgtgatgttggggcggagcctctgcaagccacgtttttgctttcccagctgggttgctataagccccggcctaaagagggcgctagacggagaccggccattggaggaggaagcagggatttgctccacctatttgcttcaggcatccgagcaagcgtcgccccagaacaacgctccctctgacagcagcagttgcttccaggttttttgtttgtttgtttgttttttgttgttgttgttgttgttaagacggagtcttgctctgtcgcccaggctggagtgcaatggcgcgatctcagctcactgcaacctctgcctcctgggttcaagcaattctcctgcctcagcctcctgagtagctgggattacaggcatccgccaccacgcccagctaatttttgtatttttagtggagacaggatttcaccatgttggtcagactggtctcgaactcctgacttcaggtgatccagccaccttggcctctcaaagtgctgggattacaggtgtgagccaccacgcccggccctcttccaggtttcaagttttatttttttggcacctccctaacctgtttctttttctatttctgtcgcccaggctggagtgcagtggtcgaggctcactgtagccttgacctcccaggctcaagccatactcccgcctcagccttcagaatagctgggaccacaggtgcacgccaccacacccagctaattttttgttttcaaattgtttcgtagagatgggggtctcgccatgttgcccaggtgggtctcaaactcatgggatcaagggatcctccaacctcggcctcccaaagtgctgtgattacaggcatgagccaccacgccggatgccataaccagcatcattgtcagccttctgtcacaccagcgccaccctggtagcccctggctctagtctgggtttcagttctgcagggctgctgcctcaacattttaggttctgatagctgtattctcagtcctggagtgacaggtgtagcctgcagttactatttttatacggtgcagttactatttctgcgctgtttcttctcattcctttcacggtttcctgagacctgtttaatttatctgagacccgtgtattaattcatctctgttgaagtatctatataacaggaaaactccaggtcgtgtgtgtagaaatctgacgtgagtcatcaagatggagaatttgcacgaattccacatgtaaagcgatttggagaccaaaaattccttaattgaagaggaggctggtactcttgaggaattaccctaaaataactgctgcaagcttatattttgcatcttccattcaaataggacttgtctccgtttatgcagtaactgtgtattggggaaaggaaaatactcagaccttttagggattagcagacactggcccggcctatttattcatttttgagatgcagtctcactctcttgcccaagttcgagtgcagtggtgtgatcacagctcactgtggcctggctcaagtgatcctcctgcctcggcctcctgagtagctgggatcacaggtgcacgccacca[133 bp omitted]gaaaccctgtctctactaaaaatgcaaaaattaaccgggcatggtggtgtgtgcctgtaatcccagctactaggggggctgaggaaggaggatcacttgaacctgggaggcggaggttgcagtgagccgagatcatgctgcactccagcctccgcaacagagcgagactccatctcaaaacaaaccaaaaaattggtctttaataattttttatttttgagacggaatctcgctctgtcacccaggctggagtgcagtggcgcgatttcagcttaatgcaacctccacctcccgagttcaagcgattctcctgcctcagcctcctgagtagctgggataacaggtgtgcgccaccacgtctgacaaatttttgtatttttagtagagacagggtttcaccatgttggccaggctaataaagttttaaaataaaaaaataaaagaaaaaagaaaaatacaccacatttgaggtattttccaacccatttagtgagtaacctacaaaaatgccaactcggagtgtcgtccaagtgcgtgagaaggctctgcatccggctgatgctgagcttaagctcagtcttgtgactcagcagctcacatgatactcagaaaagaatgtggcaaatcgagatgctgtatgacctccagaaagtgccaataggagcattttccggcataaactcgtagggttttggcacaaagccatgccatcttctgcacacaactcatctctgtgaagaaacaattccttgtctcggttagagatagatacctggccatggagcaccgagcaatgataaaacctgagctgaccatcaggaactcggtgtaatccgacccacaaatccagaagattgagcacaggcaatggcagtgcatcaggtggaaataagaaataaagtgttggccgggcgccatggctcactcctgtaatcccagcactttgggaggccgagacaggtggatcacctgaggtcaggagttcgagaccagcctggccaacatggagaaacccccatgtctactaaaaatacaaaattagacaggcatggtggcgcatgcctgtaatctcagctactccggaggctgaggcaggagaattgcttgaacctgggaggcagaggttgcggtgagctgagattgcaccattgcactccagcctgggcaacaagagcgaaactccatctcaaaaaaaaaaaaaaaaaaaaaagaactaaggtgttggcataagcaatgacacaagcaaattgcttgagtggacagcacagaccgttctgccatctatacccactgttttgtcttctctccatttatacccatggcttcatggacagctcctcatgactttttttcttttctttctttctttttttttgagatggagtcttgctctgttgctcaggctggagtgcagtggtgcgatcctggctcaccacctctgcctcccaggttcaagtgattctcctgcctcagcctcccgagtagctgggactacaggtgtgcaccatcacgcccagttaatttttgtacttttagtagagacggggtttccccatgttgaccaggctggtctcaaactccagacctcaggtgatctgtcctcctcggcttcccaaaatgctgggattacaggtgtgagccaccgcaccaggcagctcctcgtgattaattgaactggggaggacacaactttgggctggtttttagatggctcagcatgatatactaggattctcagagtcagccacattgcagccctcagaggaaccagcactagcctggcagtctcccttcccagaaatctgagccccagctcagcaatgcccacttctgagctgggcagcaaccctgagcaaccaatctcaagagccctgaggttcatctgatcctctctttggtaacatagcaggattggctcagcaagcctgcgctgacgccacagatacagaagaacaggctgataccagctgctgagccccagaggctgcccttttctagccagaacattttttctgaccaggaagctgtcatcgccacatagctgtttctcctcttccccgattctataaatacaaaaacacagtccttctttactgggatgctgctggccacggtgcaggcagaccgttcatgtttagccggagtcacgggctggagggatgctccctcctctacctgtgcgtcttccctcagtgaatctattcctgtctctatcacacaggcctagtggtgtgtgtgacagttggtgaccacagaggaaaattctccatctgtcctgctgccgtgttctttttgtttgtttgtttttagacgaagtcttgttctgttgcccaggctggagtgcagtggcgcgatcttggctcactgcaacctccacctccccagttcaagggattctcctgcctcagcctcctgagtagctgggattacaagtgcccgccaccatgcccggctaatttttgtacatatatatgtgtgtgtgtgtgtgtgtgtgtgtataggtatatacatatatatatgtatatatacacatatattcgtatatatgtgtatatacacatatattcgtatatatgtgtatatacatatatatttgtatatgtgtatatacatacatacatatgtatatacacacatatgtatgtatgtatgtatgtatatatatatatatgtattttttttttctgagactgagtcttggtctatcacccaggctggggtgcagtggcacaatcttggctcactgcaacctctgcctccccagttcaagccattctccagcctcagtctcccgagtagctgggactacaggcgcctgccatcacgcctggctaatttttgtatttttagtagacacagggtttcaccatgttggccaggctggtctcgaactcctggcctcaagtgatccgcctgcctcagcctccgaaagtggtgggattacagatgtgagcctgtgagccaccacacccagcctggtgctgtgtttgcaagcaacatggagtttggcccactatggaggtggaagacattccctcctaatggtggtggcaggtcacatgtaaggccagtgagtaaactggatgtccatgaagccagggtgggcagcagagctgtggtcagctagtgcagtgtactctggagaggctgctgacggggtggggatggctgtggtgtcccctcacccgggacctggtgaggccccctaagatgctgtctgttccaggtctcaggtgcagggaaagacagatgactgtaaacagaatgtgtaagacaccagaggcccccagacaagcaagtcatttgaaaaacatggttcattgtatacaaaaagaaatctctaggtagcggggctgcaggttttcagaggaaaggaggcaggaggctgggatgagggctaaagagtgcagatgcaaattacaaaattaaccgagtgtggtggtgggcgcctgtggtcccagctactcaggaggctgaggtgggaagatcacttgagcctgggaggtcgaggctatggtgagccgtcatcacgccactgtactccagcctgggtgacagagggagaccctgtttcagaaaagaaaaagacggaggccaaggaactggtaatatcaaaaggacgacgagtgtaactagagggaacggagctgtaaggttggctcaaagctgcaaccaagcaaatgggctgcggccaaaactgggatggatttgcctttttatttattttttatttttattgtatttttttgagacggagtctcactttgtcacccaggctggagtgcagtggtgcaatctcggctcacagcaaattccacctcccgggttcaagcgattctcctgcctcagccccccaagtagctgggactataggcacgcgccactactcctggctaatttttgtttgtttttgtttgtttgtttgtatttttagtagagacggggtttcactgtgttagccaggatggtctcgatcttctgacctcatgatccacctgccttggcctcacaaagtgctgggattacaggtgtgagccactgcacccggccggatttgcctttttagaacaaagacgtaggcaagccaaggggctgatacacacaaccagattaagtttggaaaaactgtgggcattggacacacgcttttgcttctcttgaatatctaggattgggatggctggatggtataggaagtgtatgtatgactttataagaaattgccaaaatcttttcctaagtagttgcaccgtttgaattttgaatttccaccagcaatgcatgagagcgttctagtggccctgatccttaccaggacctgctattatcagtgcttatgattttttgtgttttttttgagacagagtctctctctgtcacccaggctggagttagtggtgtgatctcggctcactgcaaccttcacctcccagattcaagcaattctcctgcctcagcatcctgagtagccaatattacaggtgtacaccaccacacccagctaatttgttgtatttttagtagagatggggtttcaccatgttggtcaagctggtctcgaactcctgaccccaaatgatcaacccacctcggcctcccaaagtgctaggattacaggcgtgagccaccatgaccagcaagttgtgtttgtttgtttgtttgtttgtttgtttttagcacaaagtattggctgggcacggtggcttacacctgtaatcccagcactttgggaggctgaggtgggaggatcacttgaggccaggagttcgagaccaggcttgggcaacatagtgggactttatgcctacaaaaaattttttaaaattagctaggtggggtggtgtgtgcacctgtaatcccagctacacgggaggctgaggtgggaggatcatttgagcctgcgagtttgaggctacagtgaactatgattgcaccattgcactccagcctaggtgacagagcaagactcggtctccccgccccacccccccaaaaaaaaggatcaggtaatgtgtacaagtttttgtttgaagacctgtcttcagttcttttgggtaggtacctaggggtggaatgactgggtcatatatatgctaattctgtgcttaactttttgaggaactgccaaactgttttacacagtggctggaccattgtacattctcaccagcaatgtacgggggttccaatttcttcacatccatgccaaacacttgttattcgcagtttgttttcttttctttttatttttcttttgagatggagtttagctcttgttgtccgggctggagtgcagtggcacaatcttggctcaccgcaacctctgcctcccgggttcaagcgattctcctgcctcaggatcctgagtagctggaattataggtgcctgccaccatgcccggctaatttttgtatttttagtagagatggggtttcaccatgttggccatggtggtctccaactcctgacctcaggtgatccacctgccttgacctcccaaagtgctgggattacaggcgtgaaccactgcgcccggcccagtttattttcttgatcgtagccatcctagtggctgtggagtggtgtcccattgtggttttggtttgcatttccctaaggactagtgatgctgtgttttgaccattctcacattcttttttttttttttgagacagggctggaatgcagtggcatgatcatagctcactgcatccttgaactcctgggctcaggagattctcccacctcagtctcctgagtagctgggactacagttgtatgccaccgtgcccacgtaatttataaaaaaattttagtagagacgggatcttactatgttgcccaggctggtctcaaactcctgagcacaagtgatcctcctgcctcagcctcctgagtagctgggattacagatgcacaccactatacccagctaagtttttatttttttttttttaaatagagatgggtttcattatgttgctcaagctggtctggaactcctgggttcaagcgattctcctgccttggcctcccaaagtgctgggattacaggtgtgagccactgcgcccagccttatgcgttctttggaagaaacggcttttgggtaatggcctgcactgttgtattgtatcagctgccatccagtcgaagctaactaagggcaggtgggtgttgaatgaggacaatgcccacctgcccttagttagctgtgactgcaagaacaaagaccctgttatcccaatcatcatcatgaggactagctgggccgcagcttaaagggacatttcatagcttaaaaaagacaaactgttggtcctgccacctccaactacaaaggtgttgcaactgataagccttttgggatcttgaggacgccacatctcacgtgtggaaatttcactaacgtggctgcagcaagtgaccagacagatggccgcatttgagtgggagcctctttagcaagagctttttaaaatcaagctccacccaggagctctttatcttcttcagaacccacgggattacagacatctgcaccagcccccgtgggaccttggagtccaggagaatgaataccaaggcattgatgctcatgctccctgctggctggtgagtaataaagtcccttgtctctggcccaggagtcttgtgtcttctggcaacatttgtgaaacagtaatgggctagcttgttttatttttatttttattttttattttattgattgattcattgaattagggacagggtctcactctgtcacccaggctggagtgcaatggtgcactccaacctgggctcaagtgatcctcccacctcagcctcccgagtagctgggactacaggtgcatgccactatgcccaactaattttttacattttgtagagacggtctggctacattgcccagagtggtctcgatctcctgggctcaagggatcctcctgcttcagcctcccaaggtgctgggattacaggcatgagccactgcacccagcccaggctggcttgtaagtaggacaaaatgaaagtccggacctggtagtgtggaaaaggatgggatgttgacagaggcgtggctttctggaattggaaggacagggcctccatgggcctggttcaaaaatatgagaagaatccctgggatccagtagggaattctctcatccaagtagaggaggatggccaggaatagaggtcttcactgtcctacttgtattttttttttttttttttttagatggagtttcactgttgttgcccaggctggagtgcagtggtgcaacctcggctcactgcaacctccgcctcctgggttcaagcaattctcctgcctcagcctcccgagtagctgggattacaggcaggcaccgccacgcccggctaattttgtatttttagtagagacggggtttctccatgttggtcaggctggtctcgaactcccgacctcaggtgatccacctgcttcggcctcccaaagtgctgggattgcaagcatgagccaccgcacccagcctgtcctacttgttaatgaggctcagtggctacagataggatcaaaatcagtgggcaaaacagtgggcaaatggtgcctggctgcacctgggttcttacccttctccaggcaggtggaggaagaaatgggatcatgaaaatgagacaacaagccccagggacccaaccaagaggcagcatggctgtggccgctgggtcaaagggtctctgaaaccgaagtggtatcagcaacaaggaccttgttatttgtttctttgttttgagacagggtcttgctctgtcacccaggctgaagtacagtggcgcaaacatggctcactgtagcctcaaactcccagggccaaggggtcctccccactcagcctcccgagtagctgggaccacacgtatgcaccactacacccagctaatttaaaatttttttgtagagatgaggtctcgctatgtttcccaggctggtcgtgagctcctgagcacaagtgatgcaatcacctcggcctccgaaagccctgagattacaggcatgagccgctatgccctgccttgctatttgatattgagccttcagtgggctgaaaacattagtgaagatcccaccctgcgagtgtttctggccccaccacggtccaatttggatccagtccacagctgggtgcagggctggtcaaagatgctgaggactgggagggctgagcctggccatctgtggaagagcagaaagagaggggcctctgtgcctaagaacttgctgggtcctgggaggtacctgggttgcagctctggcactgatcctggagggaggagccaagtgagccgatagagaggtcaataatgaagtttttttgttgtttgttttttgagatggagtcttgctctgtcgcccaagctggagtgcagtggcatgatcttggctcacggcaagctctgcttcctgggttcatgccattctcctgcctcagcctccccagtaactgggactacaggtgcccgccaccatgcctggctaattttttgtattttttatagagacgaggtttcaccgtgttagccaggatggtctcgatctcctgatctcatgatccacccgcctctgcctcccaaagtgctgggattacaagtgtgagccaccatgcccggccctttttttttttttttttttttttttgagatggagtttcactcttgttgcccagactggagtgcaatgacgcgatctctgctcactgcaagctccgcctcccaggttcaagcaattctcctgcctcagcctcctgagtagctgggactacaggtgtgcaccaccacacctggctaattttgtatttttggtagagacggagtttctccatgttggtcagtcaggtcttgaactcctgacctcaagtgatccgcccgcctcggcctcccaaagtgctggaactacaggtgtgagccaccgcgcccgaccaacaatgagtttttttcccctgcctttgctgtccccctgggatgccccccagccccaagttgctccagggctgaggctgtagtccctgacccacagacttcttggtccaagtacctgaattcaaccagtcaggctcccagtgggaagggaagctgaagagatctcgttgggtgtggcacctagagccaattcaatgtcccgctgtgtggtttccacgactgagcgggtgtaattggtactgatgctttacatgctcgaaaaaactacacatgccttgttatcagaggattctaccagtcggaggctgtggcatatgccgccctcttcacctctaccagaaacaatgtgggatcccagtagaaaaggaaacacaactgtaatgactaaatggctgctggagtgctccgggaagccgtttcccagtgccacagtgccacctgcctgacacggccaccaagtacactccttttaaaaagaaagggcagctgggctgggtgcggtggctcacaccaagaggtgggtggattgcttgagtccaggagttcaagaccagcctgggcgacatagtgaaaacccatctctgttttttttaaattaaaattttatttatttattttgagacagagtcttgctctgtgaccaggctggagtgcagtggtacgatctcggttcactgcaacctccacctctggggttcaagcgattctcctgcctcagcctccccagtagctgggattacaggcacctgccaccatgcccagataacttttgtattgttagtagagactgggtttcaccatgttgg[132 bp omitted]cgctatgaatcactattaagctctccttgaaagcaaacgcctggcttgtggtggcctttgactccccagcctcacacccttgttctcgggtaggttaactgcagcttcactagcaataccggaaatggccaaaggtaaagggtacgtctaagagcacagctggtctggtcctcaggtcttctgagttttacatacaaaagtcacagctacccctgtttcttctgttttctgtttcgagacggtcttgctgtgttgcccaggctggagtgcagtggcatgatcgtggctcactgcagcctggaactcctgggctcaagcgatcctcccacctcaacctcctgagtagctgggactataggcatgcgccagcatacccggttaattttttaattttttttttttccagagacagagtctcgctgtgttgcccatgctggtcttgaactcctgggctcaagcaatcctcctgccacggcctcccaaagtgctggaattacaagtgtgagccgccgcaccccgcagcagctaccccatttggagaaaactctcctccactcccctgcctgaggcaattcctctggctcaatggggccctcaattcaaacgggttcccttaaacggctgggcgcattccactatgttaaacctaaagatgtccactagggggcagcaaccacctaaccccaacaccaactccggaagacattgattgcagtttggttgatatttaaggtattcaatgggactttgtaacttcctcactatctgcgggtgtctggtattattgattgttggatcatcttcctcaagaatcagctcaaaaaggtttctggtttccccttcctacctcttcctgatccacacactttatttatttattttttgagacagatgctctgttgctcaggctggagtgcagtggtgccatctcggctcactgtaacctctgcctcctgggttcaagcgattctcctgcctcagcctcccaagtagctgggattataggcgtcaccatgcctaggtgatttttgtatttttagtagagataggtttcaccatgttggccagctggtctcgaacccctgacctcaagtgatccacccgtcttggcctcccaaagtggggggatcacaggcgtgagccaccacacccggccgcacacactttactcaggccgtttggtcactgaatgtggcagtcccagaagaggcttcatctcttcttggct[169 bp omitted]gaggcaggagaatggcatgaacccgggaggcggagcttgcagtgagccgagatcacaccactgcactccagcctgggtgacagagcaagactccgtctcaaaaaaaaagtacaattttgcccgctgaccattgttgggaatgatgcatctttctttccgctggacagcctggtggtcatgccctccagatggcagttgagtcctgagggggccaagtaggggattcaaactaatgctggtttaggcaccagaatccccttgttggaccgacatggtgctagatcaggagttggcacactatagcctgtgggatacatctggcctgtgacctgtttctgtgtggtctataaactaacaaagcttttcatatattttaaagaatgtgttgttgttgttgttgttgttgttgtttttgagatggaatctcgctttgtcgcccaggctggagagcagtggtatgatcttggctcactgcaagctccgcctcctgggttcacgccattctcctgcctcagcttcccgagtagctgggattaaaggtgcccgccaccatgcccggctaatttttgtatttttagtagagacggggtttctccatgttggccgtcctggtcttgaactcctgacctcaagtgatccacctgcttcagcctcccaaagtgctggaattacaggcgtgagccacggctcagccaagaattgtttaaaaaaaaaaaaaaaaaaaaaaagccaggtgtggtggctcacctctgtaatcctagcacttggggaggctgaagcagaaggatcacttgagcccaggagatcaagactagcctgggctatgtggtgaaagcctgtctctacaaaaaattaaaaattagctgggtgtgctggtgcacgcctgtagtcccagctactcgggaggctgaggtgggaggatcgcttgagcctgggaggtcgaagctgcagtgagatattattgtaccacagctctccagcctcagtgacagagcaagatcttgtttcaaaaagaaaaaagaaaaagatgactatgccacagaaaacaaatgccctacaaaacccaaaatactattacctggttctttccagaaaaagttggctcactcctgtgttagttgaaacaacctgctgatattacttatgtggcttaactgagacaatgtaacggtaattccagccaagcttaacaacaaaatccaatgactgtctcttctcaggttggggaggtaagctgtggcatgcccattgtggatgggggttgcttttaggctcatctgttgtcaccctgtaattgtttgtaaagacatcaaagatcagatcagtttttttatttttaaatttctttttttggtattttagcagatcagcctaaagttctctgctctgcttataatggacaatagagtcgccttagactatatcctggttgtccaaaataagatgtactggtcctctgggaccagtttttactttttttttttctgagatggagtttcactcttgttgcccaggctggagtgtaatggcatgatctcagctcgttgcaacctctgcctcccgggttcaagcgattcttctgcctcagcctcccaagtagctgcgattacaggcatgtggcaccatgcccggctaattttgtatttttagtagagacgtggtttctccatgttgatcaggctggtcttgaactcctgacctgaggtgattccccctcctcggcctcccaaagtactgggattacagacgtgagccaccacacctggacttttattttttttttattttaattttattgtattagagacagggtcttgctctgtcacctaggctggagtacagtggcgtgatcttggctcactgcaacctcaaccttctgggttcaggggatcctcccgcctcagcctcccaagtagctaggattacaggtgtgccaccacttctggctaatattgtttttgtattttttgtagagatgggccttcactacgttgcccaggctgatcttgaactcctaagattaaatgatctgccggtctcagcctcccaaactgcagggattacaggcatgagccaccttgagacttattcacagttggctgagtctaggaccctgggggacatagttgagagttgaggtcaatactcaaggttggcctgatcttgctgttgggagtcccatcaaaagtagccttaattaaaggccgaatgagacaaattgaagtgatttttttttttttttttgagatggagtctctgtggcccaggctggagtgcaatggcacaatcttggctcattgcaacctctgcctcccaggtttaagcgattcttctgcctcagcctcccaagtagctgggattacaggcacctaccacgacacctggctgtttttttgtatttttagtagagaaagagttgccccatgttggccaggctagtttcaaactcctgacctcaagtgatttcagcctcccaaagtgctgggattacaggtgtgagccaccatgcctggcctgaagtgattttattccagcctgttagttagatgaatcagagtggctgatgggtgtcagagtcatttgaaaacttgccagaagctaagatgatgcgggtctgggggtgggtattgctgtgttgggagactgtcctccacagttgtcttgtgtttcctgcatgttgtgtggggtgtgcatggctgcaaggccctggtcactgtttcttcagggttgtttacgcagctggcaaacttgagcaatgaggcaacccctcccctctcacaaagagaggcttgcttgttgattgctataaagaagagggggttccctaagctcagtgctcctctcctgtaatacaaccctctgtacgtgcaggcatccacctgggccctggcattgcccttacagagtttggagagaaaggagaaccaatgaaaacatgctgtgtttatgctgctggctgtactgggaggaatatggtcctttgtctctgacccaggagtttcatgtcttctgccaagatacattacatggacagatacattaggtagatagatacattagatatagatagatacattagatatagatagatacattagatatagatacattagatatagatggatacacagatagatacacagatagatagatagatagatagatagatagatagatagatagatagattcatttatttattgagacagagtcttgctctgtcaccgaagctggagggtagtggcttgttcttggctcactgcaacctccacctcctgggttcaggtgattctcctgcctcagcctccacagcagctgggattacatgcccacctaatttttgtatttttagtacagacagggtttcaccatattgcccaggctggtctcgaactcctgacctcaggtgatcttcccgccttggcctctcaaagtgctgggattacaggcatgcactaccgcgcccagccagatgccgccattaagtgcttttttgggaagaggttgctcacacctccatttgtacaagggatacttgcattctattagatggaagcacaatgatgttttcttgttgtataaaagtttaaataagggtagatttgtgtgaacagatactgagtagccaaaatgttggcctgtgttggacactgttgcctctcagttccatattcttctttcttctcttttctatcgatggccaggctaggaagcctacaaaacatattccccaggcccctgtggtattgtcagtgaggcatgttgctttctgctgctttaaatgctttactcacagccctaacctctttgcactcaattccagcacttatgtcatctctgcgtctactgcttgtctttttctcttggtgagttgcaattttgattctttgtatgctgagcaattttgggttgtattctggacatcttaaatattatgtgataaggtgctgggtcttgtttaaattctatgtagattgtggatacgttttgtgcgggggggttgttttgtttcgtttttgacacaaggtctccccctgtctcccaggctggagtgcagtggcgtgatcttggcccactgcaacctccgtctcccaggttcaagagattctcccacctcagcctcttgagtagctgagattacaggcatgtgccaccacagcccggctaatttttgtatttttattagagatggggtttcatcatattgctcaagctggtcttgaacttctgacctcaggtgatccacccgccttggcctcccaaagtactgggattacacgcataagccaccacgcccggcctgttttagttttgttgagacagtgtctcgctctgttgctcaggctggagtgcagtggcatgacctcggctcactgcagcctccacctcccaggctcaagcgatcctctcacctcagcctcccaagtatctgggattacaggcacgtgccaccatgcctggctaatttttgtattttttggtatagatggggtttcaccatattggccaggctggtcttgaacgcctgactgcaagtggtcctcctgcctcggcctcccaaagtgctgtgattacaggcgtgagccaccacacccggcgatacttttgttttgacaggtcactgacctagtttggttcagctcagggcttctgagcagcctgctgtgggttgtggtttcaggtgagttctgacttcaaagtcgttacaatgactttctaatctgtcttccccatggaccacccactggccagactggaacccagatggtgttgaatcccttcattgtgtcttcaacatctttggaatgttgtttaggctcagatccacatgcatcttaggggcaaacagagaaattcatgaaagcaacttcattaggtcactttcccaatctcctccctctccgcggtactttctggtttctctcccctttgttggtcctccagccagaaagctggggcctcagctaccccacttgcctcacacttcctgtgattgaacctgcatctacagcgaagtgggcaggaggatgcagggggaaagaaagcaatggggatgggtgctgtccccgggggaccacagagccttgatcagggaggagagaacagagaaagaaacagaaaaaggggaaacaggggattcccccaccctctgatcattaaaaggcattcattcattcattcattcattcattcattcgagatggagtctcactctgtcgcccaggttggagtgcagtggcgcgatctcggctcactgcaacccccgcctcctgggttcaagtgattctcccacgtcagcttcccaagtagctgggatgaaaggcatcaaccaccaggcctggctaatttttgtattttttggtagagacggggtttcaccatgttggccaggctggtcttaaactcctgacctcaagtggtccaccaaccttggcgtcccaaagtgctgggattacaggtgtgagcaacggtgcctggctggcccttattattattataaagatgataatatattcattgaacttagggccttaggacatttttttttagtcttacaatcttgctctgtcgcccaggctggagtgcagtggtgtgatcatagctcactgcagcgttgacctcccaggctcaggcgacactcccacctcagcctcccaagtagctgggaccacaggcacatgccaccacacagggctaatttttaattattttttttccagagacggaggatcttgctatgttacccaggctggtctccaattcctgggctcaagcaatcctcccaccttggcctcccaaagagctgggattacagatgtgagccacgacacctggccctgaaaattttgtttgcaatgaacaattttaagagattgggtattgttttcaaagtggaatagcagcaaatagtcctttctttgctcaagagccctatttgggtattcagaagttcttattaatgtttcccttcctcctgcttctctgcacaaccctacctcctctgcttcttctacaccaatgtacctggacttggatggcttggggtattgggctgagcccatcgctggaaggacctgaggctaggaatggtgggctgtgggcaggttaagagggaagaagaggctggaaagtttctgggccgtctgtgggagggaagactccctgggactcactcaccagggggttgctgaacgtcactgaggctgctttggtgtggcctttctgcctttgacagcaggaggaactggggtgagaacaaagctattggcaaaggagaaaggggagaggttagggatccaggaatcaggcctctgccccttctccttcagcgtctccctctttctttctttctttctttccttctttctttcttttctttctctttcttttttctctttctctttctttttctttttctttctttcctttctttctttcctttcctcctttctttccttccttccttctctctttctctctttctttctttttcttggagattccacttttgttgcccaggctgaagtgcaatggtacaatctcacctcactgcaacctccacctcatggattcaagtgattctcctgcctcagtctcctgagtagctgggattacaggcacgtgccaccatgcccggctaatttttgtatttttagtagaaaagggatttcgccatgttggccaggctggtctcaaactcctgatctcaggtgatctgcctgcctcggcctcccaaagtgctgggattacaagcgtgatccaccacgcccggcctccattgctttctgttcccagtccccgacacacacatctaaaaaggcaagttcgacgagagccaggatttttatctgtcccgtttctggttgtatccctgacacctagaacagatgagagttcttgacacagagtatgaactccataaatatttttaggccgagcatggtggttcacgcctgtagtcccagcactttgggaggccaaggagggaggattgcttgaccccaggagtttaagacctgcctgggcaacataggagatgctgactctacaaaataaaaaataacaaaatagctgtgcatggtggtgtacccctgtcatcccagctactcgggaggctgaggtgggagaatcgtttgagcccaggtgttggaggctgcagtgagacatcattgcaccactgtacttcaggctaggcaacagaattagaccctgtctctaaaagaaaaaaataaaaaatacttaaaaattagatcaatgaatgaatgaatgaaaaagtgtttgggactaggtgcagtgactcatacctgtaatcccagcactttgggaggccaagttgggtggatcacttgaggtcaggagtttgagaccagcctgcccaacatggtgaaaccctgtctctactaaaaatacaaaacttagccaggcatattggcgggcacttgtaatcccagctattcaggaggctgaggcaggagaatcgcttgaacctg[450 bp omitted]ggagtgggctggagggaacaagtgaaggctgggaggccaggagggaggctgggttgatggtctaggcaggagaggatgaggtatgaataagctggggtccgggtgtggagacgaagaaggtggaattgggcagagaaagtcagggggcagcagggatggggctgggggctgatgggctgtggggaggtgaaggggaggaaaggagagaggaaggtgcctggggtgtggcctggtgactgggtagacagtggctccactcctgagaggtacagaatctgggagaatggggtctgggaggcagatgctgagtgtgagagactgtggggagaggaggtgggccaagaagcatttcaa[135 bp omitted]acatggagaaaccccatctctactaaaaaatacaaaaatcagccaggcatggtggcaggtgcctgtaatcccagctacttgggagactgaggcaggagaattgcttgaatccgggaggcggaggttgcagtgagtcgggatctgtgtcagtgcactccagcctgggcgacagcacaagacttcgtctcaaaacaaaacaaaacaaaaaaatacccccaaacaacaacaacaaaacattttattatggaaacagttataacctacagaaaagtagagaaaatcatataacgaaaccccacgtactcatcattcagctcattccgcttcagtgtgaaacatttttgccgttcctcttttgtttacgactccatccgcacttagttatattttgctacagtgtttaatagtacatctggtgcttcttaaaaatggaaatgatttttttttggctgcagtaatggtatcatatgttctctaaagaattgatactgtgctgaaaatacaaaaaaaaaaaaaacaacataaatgggtcaggtgcagtggctcatacctgtaatctcagtactttgggaggctgaggcaggaggattgcgtgagcccaggagtttgagaccagcctgggcagcatgggaaaaatcccatctctacaaaaaataaaatacaaaaaattagccaggtatggtgatgtgtgcctgaggttccagttactggaggggctcaggcaggacgatcgcttgaaccccggagttggaggctgcagtgagctataattgtaccaccgcactccagcctgggcaacagggcaagaactccatctcaaacaacataaatgtcattcatcattgcaattctcatgcaactgatgttaaagtttggttctatatcctcctagacactttacacagatacttttgcaaaagtaggagtataccattgtaacaggaatgccacaccaaaggttgctgcctagccatgagaacacctctcctgagtggtccaagctggtggtcagagatgagcacctagaggcatctttgtcacccagcagactaggctctccactttcctgctgcttcctttaaatggaccattcagacatttgcctgtgaatttaaagtgatccacacccttctcctctgtacacctattccgctagctgtgatgcattctctctctctctctctctgactcttcttcttccctgccttgcaggacccagggatggagcagtgtcctcactcattgcactcaccctacccaggatctgtaagtaataaatcttggaccttatatatatatttattttaatttgatttccattggttattgggaaataggtggtgtttggttacatgagtaaggtctttagtggtgatttgtgagattttggtgcgattatctcctgagcagtatacactgagcccaatttgtagtcttttattcctcgctcctttcccaccctgagtcccaaaagtccatcgtgtcattcttatacctttgcatcctcatagcttagctcccacttatgagtaagaacatacaatatttggttttccattcctgagttacttcccttagaataatagtctctaatcctatctaggttgctgcaaatgccattaattcattcatttttatggctaggtagtattccatcatgtatctatatatacacatatatatgtatatatatgtgtatatatacacatatatatgtatatatatacacgtgtatatatatgtgtgtgtgtatatatatacgtgtatatatgtgtgtgtatatatatacgtgtatatatatgtgtgtatatgtgtgtgtgtgtgtgtgtgtgtgtgtgtgtgtatatatatatatatatacacaccacagtttccttatccacttgttgattgatggtgggcatttgtgttgcttccacgtttttgcaattgcaaattatgctgctataaacgtgtgtgcaagtatctttttcatacaacttctcttcttctgggtacatacccaggagtgggtgttgttttttgttttttgttttttctgtttttttttgttttttatgaagtctcgctttgtcaccaggctggagtgcagtgatgtgatctcggttcactgcaacctctgcctcccgggttcaggcaattctcctgcctc[133 bp omitted]agactcccaaagtgctgggatcacaggcgtgagccaccgcagccggcatccaggagtggttttgctggatcaaatggtagctctacttttagtcctttaaggaatctccacactgttttccatagtggctgtactagtttacattcccaccagcagtgcagaagtgtcacaccgcatccatggcaacatctattatgtcttgattttttgattatgacctttcttgcaggattaaggtggtatctcatggtggttttgatttgcatttccctgaccattagtgatgttgagcattttttcatatgtttcttggccatttccatatcttcttctgagaattgtgtattcatgtccttagcccactttttgatgggattgtttttgttcttgctaatttgagttcgttgtagtttctggatattgatattagtcctttgtcagatgtgtagattgtgaagattttctcccactctgtggttgatcggtttaccctgctgactgttccttctaccgtgcaaaagctctttagtttgattaagacccagctatttatctttgtttttattgcatttgcttttgggctcttggtcaggaaatcctcgcctaagtcaatgtctaaaagggtttccccaatgatatcttttagattttttatggtttcagggcttagatttaagtccttgatccatcttagttgatttttgtataaggtgagagaggaggatccagtttcattctacatgtggctgccaatgatcccagcaccatttgttgaatagtgtggcctttccccactttgtttttgtttgctttgctttgac[144 bp omitted]gcctccgaagtagctgggactacaggtgtccaccaccacgcccaactaatattttgtatttttagtagagacggggttccactg[139 bp omitted]gtacccatcaatctgtcatctacgttaggtatttctcctaatgctatccctccccttgcccccacccctgacaggccccagtgtgtggtgttctcctcctgtgtccatgtgttctcattgttcaactcccacttttgagtgagaacatgtggtgtttggttttccgttcctgtgttactttgctgagaatgatggtttccagcttcatccatgtccctgcaaaggacatgaactcatccttttttatggttgcatagtattccatggtatatatgtgctacattttctttatccagtctaccatcggtgggcattttgcttggttccaagtctttgctattgttaatactgctgcaagaaacacacgtgtacatgtgtctttatagcagaatgatttataaccctttgggcatatacccagcaatgaaattgctgggtcaaatggatataccataattcttaagggccctagcttttttctttttaagatggagtctcactctgttgtccaggctggagtgctgtggtgtgatcctggttcactgcaacctccgcctccggggttcaagtgattctcctgcctcagcctcccaagtagctcagattacaggtgcccaccaccaagcctggctaatttttgtatttttagtagagaacgggtttcaccatgttgaccaggctggtctcgaactcctaacctcaagtgatcagctcaccttggcctcccaaagtgctgggaatacaggtgtgtgctactgtgcccagctgccctagcatttttgaaattatagatgagtattgcctttatttatttatttatttatttatttatttatttatttgagacagagtcttgctctgtcacccaggctggggtgcagtggctcaatcttggctcactgcaacctctgcctcctgagttcaagcaatcctcttgcctcagcctcctgagtagctgggattacgggtgtgtaccactcggctaatttttgtatttttagtagacacagggtttcaccatgttggccaggctggtctcaaactcctgacctcaagtgatctgcccactttggccttccaaagtgctaggattacaggcatgagccatcgcgtccggccgagcattgcctttaacttaaagtcaccagctgcattcgcctctaacaagaaagcccacctgtcctttgaagctttgaagccagtcattgatttctctatagctatgaaagtcctacatggcatcttcttccagtagaaggccttttgtctccattgaaaatctgttgtttagtgcaaccaccttcatcaatgatcttagctagatctcctggataacttgctgcagcttctccatcaggacttggtgcttcaccttgcaccttttttttttttgagatggagtctcacttttgttgcccaggttggagtgcaatggtgcgatcttggctcactgaaacctctgcctcccgggttcaagtgattctcctgcctcagcctcctgagtagctgggattacaggttcccgccaccacccatgcctaattttttttctttttgtaattttaatagagacagggttttgcaacgttggccagtctggcctcgaactcctgatctcaggtgatcctctcgcctcagcctcccaaagggctgggattacaggcatgagccaccgtgcccagccaccttgcacttttctttacggagatggctactttccttaaacctcatgaaccaacctctcctggcttcaggcttttcttctgcagcttcctcctctcagccctcatagaactgaaaagtgttaaggctttgctctggattaggctttggcttaagggttttaccttctgtccagacaacactttctccatatcggtaataaggctgtttgacttcttattttttattgattgattgagacagagtctcgctctgttgcccaggctggagtgcagtagcacacaatctcagctcgctgcaacctccacctcccaggttcaagcaattctccttcctcagcctcctgagtagctgggactacaagtgtgcgctaccacaccagctaatttttgtatttttcgtagagatggggtttcaccatgttggtcaggctggtcttgaactcttgtcctcaagtgatccacccgtctcagcctcccaaagcactgagattacaggtgtgagccactgcatgcggccactccttagttttgtgttcactggagtagtacttttgatatctttcaacttttcctttgcattcacaacttagctaactggtgcaagaagcctagcttttggcctgtcttatcttttgatgagccttcctcataatcatttctagcttttgatttaaagtgagagatgtgtgactcttcctttcacttgaacactgcgaggccattgtagggttattaactgacctaatgtcaatattgtgtgtctcagggaataggtaggcccaaggagagaaagagatgggggaatggccggtgggtggagaagtcagaacacacgcaacatttattaagtttgccattttatatgggcatagtttgtggtggccccagtgacaatagaaacatcaaaggccactgatcacagatcaccatcacagatggaagaataataatgaggccggtgcggtggttcacgcctgtaatctcagcactttgggaggccaaggcaggtggatcacaatgtcaggagttcgagaccagcctggccaacatggtgaaaccccgtctgtactaaaaatacaaaaattagcagagcatggtggtgggcacctgaaatcccagctactcgggaggctgagacaggagaatcgtttgaacccagaggcggaggttgcagtgagccaagatcacaaaattgccctgcagccagggcacagggtgagactctgtctcaaaaaaaataataataatgaaaagatttaaaattttattgtgagaattaccaaaatgcagcccagagacacacagtgagcgcatgccgttagaaaaaaatggtgctgatagacttgctcaatgcagggttgccacaaacctttgatttgttaaaaaaaaaaaaatgcagtatctgtgaagcacaataaagctaagtgcaataaaatgaagagtgccctataagagcttagtcacccttcacctcgagtccttgattgtgatatcttaccgtgtttcctttatcatcaccgcctttcacatttattataacaatacctattatgtagcagacccatttgagagtaagctgtagacatgatgcccctttactcctaaatactgcagtgcgtatttccagaacggggacattcacctgtgtaaccacagtgccattgaaatcatgaaagtaacatcgatctacttctattatctacagaccttattcgtttttcccaattattccaatatgcttttttttttttttttgagttggagtcttgctctgtcacccaggctggagtgcagtggcgtgatctcagctcaccagaacatctgcctcctgggttcaagtgaccctcgtgcctcagcctcctgagtagctgggatgacaggcatgcgccaccaggcccgtctaattattgtattttctgtagagatgagattttgccatgttggccaggctggtctcgaactcctgacctcaagtaatccgcctgcctctgcctcccaaagtgctgggattacagatgtgaggcactgcgcctggcctagtctgtttttcttttttctttttcttttttttgagacagtctcttgctcttgtcacccaggctggagtgcaatggtgtgatctcagctcactgcaacctctgcctcctgagttcaagcaattctcctgcctcagcctcctgagtagctgggattactggcacccacgaccacacccggctaatttgtgtatttttagcagagatgcggtttcaccacattggccaggctagtctcaaagtcctgacctcgggtgatccccccacctcggcctcccaaagtgctgggattacgggcgtgagccaccgtgcccagccccctgtgaagtattaagaagggcactggggcttcctgtagcacttggaacagtgttctcagtgcccatacgtgtcaccaccctaatctcacacaaaaaagacctcaggtgatccgcctgcctctgcctcccaaagtgctgggattacagatgtgaggcactgcgcctggcctagtctgtttttcttttttgttttcttttttttttttccactggagccggagctcaagtgacttaggaagcatctcccacgttggattttaccttccttccaccacagcccaggtgatttgcagttcctggtggctggtggtctgtcctggctctgagaggagacaaaaggggtgggggtgagggtggggagggggtcccagcctcttctctccctgctagagtttagccccacccctattccacacagccgttccccaggctgggacatcccagacccaaagtccctggagagcgagggaggaggaggaaggggcccagggggtggtgggcctttgcctctgagctctcagggctctctaaattgggctgtagaattggttacgttggggatgcaggaagaaaaattgacgacttctgcttctattttttaaacaaaaataagcaaaataagcttcactgataccgtgtgtagaatgacagtagatcacaacgtaaattttcgatgtttgtttgcgatgttttttcagaaagttgttatctaataggggagtgtgacaaacgtttagagacttctaaggtaaataaaaaggtgtgaggggcaggtggagatttgggaattggtcgggaaccaggaagctggcattgattttttttttttttccaaggccatgaactttgtggggatgaaggggtctttgcccaggaagtcactgagcagtatggcttctagaagatgcctcccctgccccgagctgccttaaccccgtttgacgttcaaagacgcaggtgatgtcaccccctcccactgacaacacagtaaggtccaagttctctgaggcttcttgggccgtggcccagggaaagcaggtgacccacctcccagtgccgagtgggcaaggaactcgaccccgagtaaggaccaagcatgacggtgagctagagaggacctacatgccaggttcggttctgggcacgttaccctctattttcttatttttatttatttagagtctcactctgttgcccaggctggagtgtagtggggtgatcttggttcaccacaacctccacctcccaggttcaagcaattctcctgcctcagcctcccaagtagctgggactacaggcatgcaccaccacatctggcaaatttttaaattttttttagtagagatggggtttcaccctgttggccagactggtcttgaactcctgacctcaggtgatccgcctggctcggtctcccaaagtgctgggatgatactgtgcctggccttgttttatttgtagagagatgaggtctcactctgttgcccaggctggagtgcagtggcgattcataggcatggtcctcatgggctacagcctcagactcaaacctcagcctgagtagctaggactccatgggtgcactgcgccgggctcagcaccccacagtggtgagagttgttacggtgatttagtgtggccgtcggttactcaggtagacttggtttgttgtccttgactgctgcaccgtcctccatagcatgcatttaagatccacattttatatttgattccctaaataatgagacagcttcttgtaatcacaaacgtgatccaaacatgatcacgatgaaccatccgtttctagggtttgtgtgagaactttcctatgcttgggaatggagtcactggcccgtaaatctgtgcttaatttttttttttttttttttgagtccaagtctcgctctcagtctcgctttgcccaggctgcagtgcaatggcacggtctcagctcactgcaacctccgtctcctgggttcaagcaattctcctgccccagtctcctgagtagctgggatgacaggtgtctgccaccacgcccggctaattttttgtatttttagtagagacagggtttcaccatgtgggccagactggtcatgaactcctgacctcatgatgctcctgcctcagcctcccaaagtgctgggattgcaggtgtgagccaccgcgcccggcctacttcgcttaattaaatgctgcagactttcagctgtcttctgttctggttggaagccatctcagtcaaaacatggcaaaaccccatctctactaaaaatttaaaaataccctggctcattttgcatttttagtagagacgaggtttcaccatgtaggtcaggctggccttaaactcctgacctcaggtgatccgcctgcctcggccctcccaaagtgctgggattacaggtgtgagccaccgcacctggcccccattgcagtttgagaggctttatataataaagggcagagcactcaggaggctgctcctctagggctgcaatggtccagcatgatagctattaggcacacgtggctatttttcctttttttttttttttttggagacagagtcttgctctgtcacccagcctggagtgcggtggcacgatctcggctcactgcaaggtcccgggttcacgccattctcctgcctc[211 bp omitted]gtcttgctctgtcacccaggctggagtgcaggggcgtgatgacagctcactgcagccttggcctcccgggcccaagcgatcctcacgcccagcatcttgagtagctgggaccacaggcatgtgccaccatgaccagctaattttttttttttttttgtagagacacggtctccttatgttgcccagactagtctcaaacccctgagctcaagcgatcttcctgtcttggcctcccaacgtgttgggattacaggcgtgagccaccacacctggccaaaactcagtttttattgagctataatttacagacaacaagcacagatactaaatgtatactttaatgagttttgacaaatgacccctgtcaccaatgccccaatttccgtcactccagagagttactttgggttcctttctcttcaccccagaagcaatgactgatttccatcactacatataagtctgacctgttcttgggtttcatagataatagattcacacaatacatagacatttgtgtctggcctgttacatttaatatagaacatctttgctaagcccgaggtcataaagatattctatgttttcttccggaagtttctagttttggcttttgaatttaggtctttggttcctgttaatttggggtgggggtatggtatgtggcaggaatatgtttatatttttctatatggctatacagtagttctagccctgtttgttaaaaagactttcccttacccattgaattgctgtgatatctttactgaacatcaattggtcatatgtgtataggtggatttctgttctgttctattgatcttttggtttatctttaggctaatataacactgccctgactactgtagctttatagtaaatcttgaaattcgatagtatgagtctccaacgtgttctttctcaagattgtttggactactttaggtcttttgcattttttttttttttttttttttgagatggagtcttgctccattgcccaggctggagtgcagtggtgtgatctcaggtcattgcaacctccctgcctactgagttcaagcaattctcctgcctcagcctcctaagtgaaattacaggcacccgataccacgcctggctaattattttttagtagagatggggtttcctcatgttggccaggctggtctcaaactcctgacctcaggtgatcctcctgccttggcctcccaaagtgctgggatgaccggcataagccactacacccggccggtcctttgcattttcatgtacattttagaatcagcttgtcaattcctcaacaaacctggctgagatctgaattgccattgtgttgaatctgtagatcaatttggggagaactgatatcttgttttttgagacagagtcttactctgttacccatgcaggagtgcagtggtgcgatctcggctcactgcagcctctgcctcgcaggctcaagcgattctcctacctcagcctcctgagtagctgggattacaggtgtgtaccaccatgcccagctaatttttttgtatttttagtagagacagggtttcaccatgttggccaggctggtctcaaactgctgagctcaagtaatccacccacctcggcctcccgaagtgctgggattacaggcgtgagccaccacgcccggcctacaccaattctttgaattcataaacaaatatttccatttatttaggtttttctctcaaaaataccttgtagttttcagtatagagatttttgaatatcttttgttaaatatagtcttagcatttgatttttgaggctattgtaaatggttttgtttttaaaatttcacttaactatggtttgttgctagtatgcagaaatgtgattatttttgtatattggcttttatttttgtgactttcctaagtgcacttattctagtagctttttatttttgtagattccctaggatttcctaattacatgcttatgacatctgtgaataaagacagttttacttcttcctagccagtttctatgctttttatatctttttcttgccttctttcactggctaggaacttcactatagtgttgaacagaagtggtgtaaagggatttcccttccctgttttcagtattggggaaagtattcagtatttcatcatttagtatgatgttagctgtagcttttgtcattgttgttaatatccttaacacaatgaatgattctcaaccgagggtgatttcccacctcttccagggacatttggtaatgtcatatgacttttttttttttttttttttttttttttttgagactgagtctcgctctatcactcaggctggagtgcagtggcgtgatctcggctcactgcaaactccgcctcccgggttcacgccattctcctgcctcagcctcctgagtagctgggactacaggcgcccgccac[131 bp omitted]cactgcacttggcctgtcatgtgacatttttcattgtcacaaacagctgagtggggagcgttgatgctggcatcttgagggtgaaggctaggaacactgccaagcattctaggatgcacagcacagcctctccccaccccagcaaagaattttctgggcaaaatccccatcatgttcaggtagagaatctctgcccagcacatggaggaagttctgttgtatttctagtttgttgcaggttttttttcctccaataataggtgttgaattttgtcaaatggttcttccctttaatctattaatgtaataagttacattaatttctgggataaaaccacttgcttatactgtatccactttgtttgtggattaaatttgctaatatactttgagacagtctctcgttctgtcgcccaggctggagggcgtgatcttagctcactgcaacctccgcctcctgggttcaagctattctcctgcctcagcctcccgagtagctgggattataggcgcctgccaccacgcccggctaatttttatatttttagtagagatggggtttcatcatgttagccaggctggtctcaaactcctgacctgaagtgatccacccacctcccaaagtgctgtgattacaggcacaagccactgcgcctggccaaatttaacttttaaactcagaaatggggctatttagattttctacttgcatcagtctttgtaatttgtaccttgcaaggtgtttaagttgaacttataggtataattttgatcataatattccattattattttgatgtcatcaagatctatgatggtgctccttttgttttagagtctctgttgtgcaggctgggtcaccgcagcctccacctcctggcttcaagcgattctcttgcctcagcctcctgagtagctgggattacaggcacatgccaccacacctagctaatttttatatttttagtagagatgagattttgccatgttggccaggtgggtctcaaactcctgacctcaagtgatccgcctgcctcattctcccaaagtgctgggattacaggtgtgcgccactgtgcctggccaattccctgtattttaaatgttttttttttttctatcttttccaccagctactgaaaagaaagtgttatccaactatgattatgaatttatgtgtttcttgctggagttctgaaaatttttatctattttgaaactgttatgagctgcataaacatttatataattctggcttcctgctgaattggctcatttatcattatgaaatcctcttcctaatctgtagtgttacttgcttgacttcgatgttaatgttaccacactagctttctcattggtttgcatggtatgtttttccattcctttttttttttttttttgagacggagtttcgctcttgttgcccaggctggagtgcagtggcacgatcttggctgactacaacctctgcctcccgggttcaagcaattctcctgcctcagcctcccaagtggctgggattacaggcatgtgccaccacacctggctaattttttgtatttttagtagagacagggtttcaccatgttagccaggctggtctcgaactcctgacctcaggtgatccatctgccttggcctcctaaagtgctgggattacaggcatgagccaccgtgcctggccccattcttactttaacctgtgtctttatgaagggcatctcttgaaaacagcctgtggttgagtcctacattatttaggttgataattgctgccctgcttctctcccctctccctctgaaactccaattatacatatattagtctcacaggtcgctgatactatgtttagcttttcttaattctttttctctttctgcttcactttaatttctatgtagctatcttcaagctgatcctctcttccactggttccagtccatattaaacccatccagtgaaactttcatctttttgttttagaattcccatgaggttctttagagtttcaatatctttctgaatattgaaaaccatcgctttctattaaattccttaacatatttgtaagttgttttaaagctcttgtctgctaattctaatgtctggatgatctgtgagtcatttttctcttggtcatgggttacattttcttggttttattattttaaattttatgctggatattgtatgtagaagaaaaaacgcatgttatttgtttactttgtttagtttcaatgagttcatgccttttatcccaaaagtcggctaggatgagggctatttagatttttctaagagttgagttgagctggggctgggaacagtcttaattaaatttttctccaccttcacatggaattaagagagctcacttcgcccttgatgccccaaccttctgcacctgccatcagactagttcctttgatgttgtcattgagtttgagtgagttgggttgtggctttagatgtttatggtctttctttgtattcaactccagtggggcccaggactctgagcatcataagacttatacacacttcctcagcagaattcctgggactactgtgaggataactgttggatcaagcagttgacttatgtgttggggattcttcaagactacactacctattggcagcccatgctgttattaaatgcctggatggtttcttcttagctgtgcaaaaagtctgtccacctatgaaaactcttccactcaccttacccagattaagcacttacccacagatataaaaacattcatggccgggtgcagtg[131 bp omitted]cacacacacacacacacacacgaaaaaaattagctgggcgtggta[180 bp omitted]gcccactggtcttcagtaactttataagaaagtgtggtttttattttattcatttcaaaagctcccgctaccatcaaagctgggaggtttgtatccttcaacattctgactagaagaaaaattctgctgtgaagcatttgtgaatcccaatgcctggatgcacccaagaccaagtaagtcagaatctctggaggaggaactcaggagcgttttctcatgttccccaaatgattcaaatatacagcctgggtgtataaccactgattgtggccccatgagctgtaacagccttcttttgtgagttatagaattgattttggaatcttcctccctctatttgcgatttatggaaagcttagaacagtcgcatctctgagactattttcttacctataaagtggtggatattatattagagcattccttttttgtttgagtccgagtctcgctctgtcacatgggctggagcgcagtggcgtgatctcgactctctgcagcctccacctctgcctcctgggttcaagcgattctgctgcctcagcctctagagtagctgggaccacaggggcgtgccaccatgtctggctaatttttgtattttttaatggggatggggtttcaccatgttgcccaagctgggctcaaactcctgacctcaggtgattcatctgccttggtctcccaaagtgctgggttacaggcgtgagccactgtgtctggccgcgttcctttttttaatggctgcgagaagaaaggatgttattatgaatggaaaggtctgaagtctgaagggccatgaagctgatggattgctaaggtaaagggaggggcctttccttgtacctgtgaggctctgattacttacttctcaacacaggcgtggccattggtggtggcccagaatccctgcactagaaagacgagggatgttgtccgcgttgaggttatcaggttgaccagggctgcaatggcagccaccttgacataatcgtcacctccggccttgtaggaggtgaaggtgatgatggtccccatgcccaggctcagggaagagggtacacggcccctgcttgatgccacaggtccagggaggataaggcagagagctgtgggtgactgagaagtttttaggagtgggcttggaagggtaggactaccagtaaataagcaggctaaggggtcggctaaggtagagagcaaaaggataaaagggaggctgggggcagaaagaaaggagatgtgggggaaggagactctgaggtcttgagagtcgagagagggagaaggtttggagtcccgggcctcacctctgtggtgatcatacgtctgaggctcgtgaccacaccttccaggaagaggcagaggaggatgacggaggggaggagaggaagacagaggtgagcatcagcaggggcctcccagtcaggagtagaaatatgaacggtgtcaaggtggcccagaagtaacacgatggaattatgggaggacgattctaaggagacaatatttgtggtttggagcaaacaataagctgcccaggagtcaggggcgagactccaagtaaagatggctttgaaagggtgggtagttggacacttaattccccggccttggatttacggcttatgtgtgagtttaaggagaggaaaagaaactgagaagagactttgagagagaataacataactaagaggaattttagtgatttgccccggaggtagttgagctatggcccctctctctgcatatccctatcaaacctttagtaaagtctacttttgtaggagtggtttatttttggaggctgtgaagagatggcgagctgagtctccaggggtggagatggatgacgtgaaaggtgaccacctgcatgaatgcagggaccaggaggtacaggtagagtttaccaaaataatctgataaaca[137 bp omitted]gcctctcgagtagctgggactacaggcatgcaccaccacacatggctaatttttgtatttttagtagagatggggtttcaccatattggccaggctggtcttgaactcctgggctcaatcaatcctcccacctcggtctcccagtgtactgggattacaggtgtgagccactgcacccggcctgaaatacattttctatgtaaagggagcatgatccagatgccaaggagatggattgaaagaaaatactcccaggctgggtgtggtggttcacacctataatccaggcactttgggaggtgggtagatcacttgaggtcaggagttcaagaccagcctggccgacatggtgaaaccccatccctactaaaaaatataaaagttagctgggtgtggtcatgggcacctatagtcgcagctactcaggaggctgaggcaggagaattgcttgaacctgggaggcagaggttgcagtgagccgagatcatgccattgcactccagcctgggtaacagagcaagacaccat[136 bp omitted]gtctctactaaaattagttgggcatggtggcatgtgcctgtagtcccagctactcaggaggctgaggtaggggaatcgcttgaatccgggaggcggaggctgcagtgagccgagagcacactgttgcactccagcctggcaacacagtgagactccgtctcaaaaaaataaagaaatacaaaaaattacctggcatggtggtgggtgcctgtaatcccagctactcaggaggctgaggcaggagaatcacttgagcctgggaggcagaggttgcagtgagttgagatagcgccattgcactccagcttaggcaacaagagcaaaactcagtctcaaaaaaaaaaaaaaaaagctccaaatgggtacctggaatggaattggtgccactcagctcctttaggggttaacatgttgtcaaaatgcagggaggtggaggttgcaggactcagctggggagactgtggtctgatctgaaaggttgcccacaggtgtctgcctgcagcgatgtggggatctggttgatagtgaggcatttcttcacgctgtcaatgggacagcagttctctgtagagagacctggccgacttagcttgtctgaggagagtacagaatcttcctcggacccctggagggagacgccgggtggccacatctgagtctagctccatcatgcaggctagagtgcagtggcgcgatctcagctcactgcaacctccacctcccaggttcaagcgattctcctgcctcagcctgaggtcaagagttcaagactagcctggccaacatggcaaaactactaaaaatacaaaaattagccgggtgtggtggcaggtgcctgtaatcccagccatttgggaggctgaggcatatctgagcttgtcctcagggcaggtggaagggtcacagggattgcagaagagcagtcaacagggaagagttgggctgtgttggggtggagagtgtggaagtcttcggatttgcaaaggtgacagggtagcggggctggccgtcaggggagcttaccggcgttgaaatccaaatccctgtgatcacgaccgagaagacaacccaggctgcggttcgggacgagggcttcagccgcttcttcactgtggtccgaggcatggagggtagtgtggtacaagaagtactggtgggcccagtctgaaggcaagagacgtctcggggaggggactcaggtaccaccttgctcggtgcctacttctgttcacttcctccccttggtgtccctgcctcccttggccctgctggcccctctcctcaccagtgacactgatgttcttcaccagtgggcagtggtcccagggcagggggtgagcaaaggagtagaagaaattccaggagatgatggtgctgttgtacaagctcaccgaggcgcacacctgggggtggacacggtgggcagagacctggagaccacagagggagatcggggatggcctggggctgggtccctcatttaccagactgtgagcatagctcatgctgcacagccaggggacaagctgcttccagacccggatgttgtccacatgcagccactgccccatgatcacctccatgtataagagcgggatcccgaataagagaagcatgaagaagtacatcaggatgaagctgcctgggaagggagccaggggctgtgctcaggcagccaggagtcctggccctgtccccattttcccctaggagcccacgtgcccaaccccagctttctcctccttcagggcccaggactccaagctcccagccttgaaacgccttccttaagctcaggacccaggcccctggccttacctcctccgttccggtgacacaggtaaggagaacgccacacgctgcccagcccgacagagaaggcaatctggatcaagatgctctcagtgtttttaggttgaacgaagtagttttgggtcttggtggcctggatctccttggtcttgagcctccaggacagggagttgggggtctggaatttcttagaagactctttctctgtcagataattcctcaagggactccgtggctcttctttcaggcccggtaaatcctgagaaaatcttgggtcaccaagagcagcagaatttaaaggacacgtctcaggtgccaggctgtgaaatttcataaccagggctttggagaaatgagggccagagtttaaatcttggcccttctccttatgagttactaacttatgggcaatatacatatatattttttgagatggggtcttactctgccacccaggctggagtgagtggcatgatctcagctcactgcaacctccgcctcccaggttcaagggattctcctgcctcacgagtagctgggattacaggtgtgtcctactatatcagataatttttgtatttctagtagagacagggttttgccatgttgtccaggctggtctcagaactcctgacctcaagtgatctgcctgtctcggcctcccaaagtgctgggattacaggtgtgagccgccacacccagttctgtttttctcatcttaaaagcagcggtgaatttcaaaatatttaataaaagctatggtgtgagcactcaccaatcagaatgaatgccagccataaacactggagtatcagctgaacaccagtcctgtctgaaatgattaaaataacacaatggaatattgagtgccaagagcacagtaaacaatggatacactcaggtttctttcccgttgacttctggtgtacttggaaacttttaggcccaactaatgcacatagacttctaggccaggttttacaaacacagctgtttatcacagtcactgggggagctctaaaatgatacagattcctgccttccattctgctagcctcactcctctagattaagtctaaggtggggatagagatgggtagaattttttttcttttgagacacagtctcactctgtcgcccaggctggagtgcagtggcgtgatcttggctcactgcaccctctgccacccaggttctagcgattcttctgcctcagcctcccgagtagctgggattacaggcatgcaccaccatacccggctaatttttatatttgtagtacagacagggtttcaccatgttggccaggctggtcttgatctcctgacctcatgatccacccaccttggcctcccaaagtactgggattacaggtatgagccactgcggccagccacgatgggtagactttaaaagcttcgttgggattccacctttggaaaggcagcatgaggagctctatggacccactccctagtaaaacaagtcaacttgtgagaaatataaagaaaaacatttacggtctctagaaattgtcctaagggcatatagcaagtgacaaaatatttattcaagaaaatatactaaaattctgggcaggcacagtggctcacacctgtaatcccagcactttggaaggccaaggcaggcaggtcacttgaggtcaggagtttgagatcagcctggccaacacggcaaaaccctatctctactaaaaatacaaaaattagccaggcacgtgcttgtaatcctagctactcgggaggatgaggcaggagaattgcttgaacccgggaggtggaggttgcagtgagccaagatcacgccactgcactccagcctgggtgacagcaaggctccgtattaaaaaaaaaatttatatatatatatacacacacacacacacacacacacacacacacacacacacacacacggctctttctctgccttgcttccagttgaaggctatagtatcttcccaggagggacaggccaccagcatttctcattcctctccagctacctgttgcaagtgtggtaaaaaggtcaggagctcccttcttctatccagtactgctcctcccctcttttagggcagaggctccaccccagccatttgagaatgctggagccctgatctcccctggccctagctcatgtgtaaggctaaggttacattccaggagaggcaagttgataagaaagtttaatgccccatccagcaacctgctgctaaggcagctgtgtcgctcagagagaaataggccactgtccctacccatctctggagattttactcagggagaaagccaagccttcagaacaaagagctctgaaagtctctccccaaagaactgacttgacttgaaacagcgtgggagagctcaagcctaagggcatgctcgaaaatggtggaggaggttctgttggtaagtaattaagaggaagctggtagcttcatgagacacaagctaaaccacaggccaactagtataccagagagaatcagggaaacagctaagaaggtcactcctgggttcagaacaactctcaaacaccaacctctaaaactactcctttaagggagcctaaatttaagtggaccagatgcagaacaatttatgcctcagagcattgtcaaaaacaataatcaggtggcaattagtggagcctaaaagctgagtgtggtgagggaaagagacaggagagcccacctaaaaccactgtcatcctagggtgacaatgcatgtctaaagctgtgccctttgaggaatatacattatgaccagcaggatttattccaggaatgcaaggttggtttaatatctgaaaatcaatgttatatcaatagaataaagaacaaaacccaataaagaacaaaacccatatgatcatcacagtagatatataaagagcacttgacaaaatccaacacctttcatgataaacactcaacaaacctagaaatagaaggaaatcttgacttgataaagggaatctacaaaaaaaaatctatggttaacatcatacttaatggtgaaaactgaatcctttccaagatcaggaataagacatgagtgtttttctcaccacttctgttcaatattgtactggagattctagccagagaaattaggcaagacaataaaataaaagacatcaagaatgaaaaagaaataaactgtctctcttcccatataacatgatcttgtataaagaaaatcctaaggaatccactaaactattagaactccaataggttcagtaaggttgcagaatacaagatcaatatacaaaaattgtatttctatatacttgcaaaaaatccaaaatttaagaaaactgttccatatatgatagtatgtgatacagtttggatgtttgtcccctccaaatctcatgttgaaatgtaatccctactgttggaggtggggcctggtgagaggtgtttgggtcatggggccagatctctgatgaatggcttgttgctgacctcttgatagtgaatggcttcttgtgagatctggttaagagtgtgtggctcttcctcctctctctcttgcttctgctcgtgtgtagtagaagtgacatgctggctctttatgaccttccaccaagattttaagtgtcctgaggccttcagcagaagcagatgctagcactatgcttcctgtatatcctgcagaaccgtgtgccaaaataaaacctcttttctttataaattaaagcagcatgggactggtataaggatgcacaatagaccaataggaataccagtcaggtattcctttatagcaatgcaaaagtggcctaatgcagtgtcaaaaaaaaaaataaaatacttagtaatacatttaacaaaaggacaaattttatactctgaaaattacaaaacatgttgaaagaagatttaatgaaaagaaatcccatgtttatgaaccagaaaactaagtattaagatggcaatatttcccaagttgatctatagaattaatgcagtccatctcaaaatccctagctggcttctttgcagaaaatgaccagctgatgatataattcatctggaaattaaaggcggcccagaagagccaaaacaaacttgacaaagaacaatgtcggaggactcatgcttcctgatttcaaaacttattatactgctacagtaattaaagctgcatgggactggtacaagaatgcatataaaccaacaggataccataggatagaatagcccagaaataaacctttatgtatgtagtcaattttcaacaagagtgccaagagtactcaatgagaaaaagacagtttctccaacagatattgggaaaattggatatacacatgcaaaaaaaataaccttggatccttacactctacacaataattaacaaaatggataaaagacctacatgtaagagcaaaaactataaaccttttagaagaaaatgttggggagcaaatctctatgaccttggtttggcaatggtttcttaaatatgacaccaaaatttgtccttttgtgcatcaaaagacattatcagagagtgaaaagataacccatcgaatgggagaaaacatttgcaaatcaagtatttggtaagattcgagtatccagaatataaaaataactcctacaactgaaaaaaaactaaactcagttaaaaaaaatgggcaaagtatgttaattagccctattgcgccatttcactacatatacatgttccaaaacatcacgttgtacatgataaatatatataatttgcatctgttactttaaaaatcaattttttaaaaagggcaaaggacatcaatagacatttcttccaagaagataaacagatggccaaaaagcagatgaaaagatgctcaacattgctaatcactagaggcaggcaaatcaagaccagagttaccatttcacactgatgaagatggctacaagaaaaaaaaaaatcagtgggaaataacaactgctggggaggatgtggtgaaattagaatcattatgcattgaggataagaatgtccactggagcagccatggtaaaaaccagtttggcagttcctcaaaaagtaaaacaattaccattggatccaacaattccacttccgggtaca[135 bp omitted]cctgtctctactaaaaatacaaaaaattagccgggcatggtg[167 bp omitted]agaataaactctggtataccctacaatggaatattattcatccataaaaaatgaaattcagatacatgctataacatggatgagccttgaaaacatgttaaatgaaataagccagatacaaaaagacaaatattatgattctatttatatgaaatatctagaataggcaaattcatagagacagcatattagaggttactaggggggtgctgggcagagggagaggaattactgcttcccaggtgcagagtttctatttggggtgttgacatgttttggaactagatagagatagtggttgcacaacattgtgaaagtactaaatgccactgaagtgtttctttaaaatggctaattttatgttatgtggatttcacctcaataaaaataataaaagatgatgaaataatgctaccagacagacaaaagttgggagaatttgtcattagcacatcagcactgcaaaaaatattaaaaatctttgggctgaaggaatattattggagctggaaagagatgtaagagtaaaataagagacgcagaaacacatactgcgtgatttcactcatacgtggaatctgaaaaagttgatctagaagtagagactaaaatggtggttaccagagtggggatgatgggggagtggggtgctggggagttgttggtcaaataatacaaaatttcagttagatgaaaagaataggtttaagataactatcattcaacatggtgactaaagttaataactacactgtaatcttgaaaaatgctgattttaaatattctcaccacaaaaatattagatatgtaaattagctacatttagcattccacaatgtatatatatttcaaaacatcatgttgaacacaaatacatacaatttcatctgtcagttaaaaaataataacataaaatttagaaaggaataaagaaaacctgaaagggtgtcccagctactacctaggtcaaagtagtcctagctactcaggaggctgaggagagaggatcacttgagccccagaagttttgaggctgcagtgagctgatcatgccattgcactccagtttgggcaacagagcaagaccgtgtaggcaaatttgagactaatgagtgcttaaagtaacaatagcagcaatgtattgtggggttcataatatgtagaagaaaaatattggagaacaattgaaaaaaaaaatggtgggaaaactagaaatagaaggcaacttccttaatctacagcttccttaagcctataactaacatcacactgaacaatgaaatatgaatgcttttctcttgagtttggggacaaggtaaggatgttcattccacattgtattaaaggtcctagcctgtgcaataaggcaagaaaaaaaagtataaagatcaaagtaaataaaactttccttatttaaaggtgatgtaagtatactgtcaagagatcatgtatgtagctgggcacagtggctcatgcttataatcctagtactgtgaggcaggaggatcagttgaggccaggagctcaagaccagcctgggcaacatagcaaaactccatttctacaaaaattgaaataaaaaattggccagatgtggtggtacacgcctgtagtcctagctacacaggaggctgaggagagaggatctcttcagcccaggagtttgaggctgcagtgagctgatatgccactgcattccagcttggacaaaagagtaagaccctgtctcaggaaaaaaaaaacccagatattgtatatgtaaaaagaatctacaaatggatgaaattaagtttgtaatcgaatttagcaaagttcctatatataaggcgattgtacaaaaaattatatttttgtatagtagcaacaaataattggaaaatactattttaaaacatcaaagaaatttaatacttagtaatcaatgtagttaaaatgtgtaagacctcgctgaaaactacaaaacaatgcaaaacacttagagaattttaccatgttcatgagttggcaagttgaacatttttacaatgtcaattatccccaaattgatctacagattcagggcaatcttaaacacaaaatcccatattgttggttttttggaaacagacaagctcgttctaaaattatatggaaagccaaagaccttagaatggctaaggctatcttgaagaagaccaaagttggaagacttaacttaccgtggacttatcttattatcttaagatttactctaaggctacataattaaaacaggaggggaggggcgggggagatgggggaggggctggagagaggggtgggagtgtggtgttggcaaaggataataaatagatcaatggaaaagagagtccataaatatactccagcctatgtggtcacttaatttataatagaattgccactgtgattgggtggcgatggatggtcttttcaataagtagtgccagaataatgatatctatgtagaaaataagcttgagcccacctcacatgacacacgaacattaattcaagatgaatcatagatataaatgtggagggtaaaacaaaagagattccaaaaaaatatgaaaatatcactttgactttgggtagcacattttcttaaatatacacaaagaaagcactaagaaaattagaactcaacctcattaaaattaagacgtttttaaaaattcaatgacatctttaagaaagtaaataggtaagccacagacggaacacatttgtaatgcacacatgtgacaaatgacttgtattcagaatataaataatgcctacaaaacaataaaaaaaaaaagcctaagaaaaggtgaaagacttgaacagggacttcacaaaagcagctattcagatgaccaatagccatataaaagtgctagatatcattactcatgatgaaaatgcaaattaaagccacaatcaggtactaccgcacagctaccagcacgaccaaaactgaaaacactgagctcatcagatactgtccagaatgtgcagtgaccgcagcgcccttccatcgctggcgggagcggaaagtgatttcaccattttggacgggtgtttggcagactccctaaagacaaaaacacctgttctatgacccataaagtcacgtctatgtgcataaaaatatgtacgagaatatttgttgccactttattcacaatagcctccaaatagtggcatattcatacaatgtaatacacaataaaaaagatccagttactgatgcccccaaaacacgaagctcaaaagcttttcagatttaattaataattttaatggttaataaagtatattctttttaaatttaaaaatatttaattgacaaaaactgtatatattcaaggcataatatgatttatgtatacactgtataatgattaccacaatcaaattaacacatccataaccaccataattatcgtgtgtgtgcgcg[142 bp omitted]caaaactactaaaaatacaaaaattagccaggtgtggtggtgggtgcctgtaatcccagctactcgggaggctgaggcaggagaatcacttgaacccaggaggcagaggttgtagtgagctgagattgcaccagtgtaccctagcctgcacgatggagcgagactgtctcaaataaaaaaaaaaaaatctgttctcttatcaaattcaggtaaataatacagtattattaactgtagccaccatgtatatattagatccccagaacttaataatcttataactcaaagtttgtaccctttaaccaacatctccccattccccataagccc[224 bp omitted]gaagcaggaggatggcatgaacccgggaggcggagcttgcagtgagcggagattgcgccactgcactccagcctgggtgacagagtgagactccatttcaaaaaaaaaaaaaaaaaaaaaaaaggcaatctatggaatcagaaaatatttgcaatgtacatccgaaatatgaatggaactcatacaacttaatagcaaacaaaccaaacgacctaattaaaaagtggacaaaggacctgagtagatatttctccaaagaagacatacaaatggccaacaagtatataaataaatgctcaacatcagccgggttcagtggctcagcactttgggaggctgaggcaggtggatcacctgaggtcaggagttggagaccagcctggccaatatggtgaaaccccatctccactaaaaatacaaaaaattagctgggcatgatggcatacgcctttagtcccagctactcaggagctgaggcaggagaatcacttgaaccccggaggcggaggttgcagtgagctgaaatcatgccactgcactccagcctcctgggcaacagagtgagactccatctcaaaaaaaaaaaaaatgctctggctattcagggtcttttgttattccatactctgggcggcaagccacctaggagccaaggcaagagaccgagggcatgagctgttccactatagtaaaatatgtaaaaacaacaagagttatactagatctagatcatagacatgattacatatgaatatcattaatcattagtttgtagcaattactctttatcccaatattataataatcctcgctctacaatcataacctaggaaaaaccaggccatacagagacaggaggtgagcggacatagtgagaagtgaccagaagacaagagtgcgagccttctgttatgcccagacagggccactagagggctccttggtctagcggtaacgccagcgtctgggaagacaaccgttgccaagcagactgtggtctagcggtagcgtcagtgccaaggaaaaacacccactacttagcagactgggaaagggagtctgcctttccccgggggagtttagagaagactctactcctccacctcttgtggagggcctgacatcagtcaggctcacccgcagttatccagaggcctaaccatctccctgtgatgctgtgcttcagtggtcacgctcctagtccgctttcatgttccatcctgtacacctggctctgccatttagatagcagtagcaaaatcagtgaaagtactaaaagtccctgatatgcagaaataatggcataagctgtctctctctcctttctctgcctcggctgccaggcagggaagggccccctgtccagtggacacatgacccaggggaccttacctatcattggagatgactcacactctttaccctgcccctttgtcttgtatccaataaataacagcacagccagatatttggggccactaccagtctctgcctcttggtgatagtggtcccccgggcccagctgtcttttatctctttgttttgtgtctttatttctacaatctctcatctccacacacacggagaaaaacccactgaccctgtggggctagtccctacaccatacaaattttaggatttttttgtgaaaaatgtcattggtatttttgcaggaattgcattgaatctgtacattactttgagtagtatggacactttagcaatattaattctcccaatccatgagcattggatgtctttccatttattagtaatctcttcaatttcttccaccaattttttatagttttcattgtagagatcttttacctccttggttaaatttgttcctatgtattttatttttgttattattgaaaacaggattgttttcttgatttctttttcagatagtttggtgttggtatatagaaacactagtgatttttgtatgttaattttgtgtcctacaacttcactgaacttgtttaatctaacaggtttttggagaggctgtagggttttctatatataagatcatgtcttctgcaaacaaggacaatttgacttccttcttttcagttggatgcttttttttctcttgagatggagtttcgctcttgttgcccaggctggagtgcaattacatgatcttggctcaccacaacctctgccttctgggttcaagtgattctcttgcctcagcttcccgagtagctgggattacaggcatgcgcccccacccctggatgccctttctttctttccctggcctaattgctctggctaggactcccagtactatgtggaatagaagtggtacaaccttgtgtttttctgtattttagaggcaaagctttcaactttttccccattgagtatgatgctagctgtgggtttgttatatatggcctttattgtaaccaactatgttcctgctatatctaatttgttaagggttttcatcatgaaggcatgttgaatttgagatcatatggtttttgtccttctattaatgtgatgtatcatgtttattgatttgcatatgttgaaccatccttgcatccctgggatgaatcccacttaatcatggcaaatgaccttcttgatgtgctattttaaagaaatagcatcggccaggcccagtggctcacacctgtaatcccacctttttgggaagccgaggcaggaggattacctgagctcaggagtttgagactagcctgggcaacatggtgaaaccctgtcgctactaaaatacaaaaagttagctgggcatggtggagtgcacctgtagtcccagccactcaggagactgaggcaggagaatcacttcaaccaggtggaggttgcaataagctgagatcacgccactgcactccagcctgggtgacagagtgagactctgtctcaaaaaaaaaaaaaaaaagaaggaaagaaatagggtctatgttgcccaggctggacttgaactcctggactcaactgatgtttccacctcagcctcccaagtagctgggagtacaggcacgtgtcaccatgcccagctacagttctttaaatgtttggtagaatttgtaactgaattcattagatccagagctttttttcaatggaaaactttttattaattcaagcttgttgctcattattggtctgttcaggttttctaattcttcataatattggctggttatatgtgtccaggaatttatccatttcttctaagttttccatatagttgttcataatagtctctaatgatcctttgtagttctgtgataccaattgtgatgtctcctttgtcatttttttttttttttgagacactctcactcttgttgcccaggctggagtacaatggcgtgatctcagctcactgcaacctccgcctcccagttcaagtgattctcctgtctcagcctccctagtagctgggattacaggtgcccaccaccatgcccagccaatatttgtattattagtagagacagggtttcaccctattggccaggctggtcttgaactcctgacctcaggtgatccacccacctcagcctcccgaagtgctgagattacaggcgtgagccactgcacccggcctttgatctatttgaatcatctctctttcatacttagtctagctaaaggtttgttgattttgtttatcttttcagaaaccaactctttgtttcgttgatcttttgtatttaattctctagtttatttctgctctgatctttatttttttttcctttactaacttggggtttcatttgttctcatttttccagatttttagagaaaatcccttaatcagaaaggaagactaagagaaaaaggaagaaaagatctacaaaacaactaggaaaaagtaacaaaatggcagtagtaagcccttacctatcaataattaccatgaatgtaaatggattaaattctccagttaaaagacagactggctgaacggattaaaaaacatgacctaactaaagttggccattgaacaatatgagtttgagctgcaggagtccaatgtcatgcagattttcttccacctctgccactccgagtcagcaagaccagcccttcctcctcctctccctcagactcctcgatgtgaagaccacgaggatgaaggcctttgtgtgatgatcacttccacttgataaacattaaatatattttatcttccttatgattttcttgataacattttttctctaggttgctttattggaaaatatagtgtataatagattcaacatataaaatatgtgttaatcgactttttatattgttggtaaggcttcgggtcaacattaggctattagtagttaagttttgggggagtcaaaagttattcgcagattttcaactacatgggggttggtgcccctaaccctacatcattcaagggtcaactgaatatgttgtctacaaaagactcgcttcacctgaaaggacacacacagactgaaagtgaagggatgggaagatatttcctgcaaatgcaaagcaaaaaagaacaagtagttatatcagataaaatagatcttaagcctaaaactgtaaaaagagacaaagaggccattatagaatggtaaaatagtcaattcaacaagaggatataacaataataaatatatatgcacccaatattggaacatctaaatttataaagcaaatcttaaataaacctaaagggagagatagactgcaatacagtaatagtagaggatttcaacactccactttcagcaatggacagatcatccagacaaaaatcaacaaagaaatatcagagttaaactacactccagaccaaacagacctaacaagacacttacagaaccttccatccagtagccatggaatacacattcttctcaaaaccacatggaacattatctagtatagatgatatgttaggccataatacaagtcttaacaaattttaaaaagctaaatcatattatcttttttgacaatagagtaaatctagaaattaataggcagaacattggaaacaaatatttggaaattaagcaacatgctcctaaaccaccaatgggttgataaagaaatcaaaaaggaaattcgacacaaaggaaaatgggaatacagcatattgaaacctgtggaggctgggcatggtggctcatgcctgtaatcccggcacttttggaggccgaggcgggaggatcacttgaggtcaggatttcgagaccagcctagccaacatagtgaaaatacaaaaaatacaaaaattagccaggcatggcaatgggtgcctgtagtcccagctactcagggggctgaggcaggagaatcacttgaacccgggaggcagaggttgtagtgagccgagattgtgccattgcactccagcctgggcaacagagtgagactctgtctcaaagattaaatgaataaataaaaataataaaacctacaaatacagcaaaagcagtactaagagggaaacttaaagcaataaatgcctatataaaaaatatttgaacaattagtaaacctgactgactgtggcctgttaggaaccagccaaacagcaggagttgagtggaaggcaagcagggattattgcctgaactctgtctcctgtgagatcaacggcagcattaggttctcacaggagctagaaccctgctgtgaactgtgcatgtgagggatttaggttgcacgctccttatgagaatggaatgtgtgatgatctgaggtggaacagtttcatcctgaaaccaccccccacactagtgccaaaaagattggggaccactgaataaattgcttctgtaattagtaactttgctccaaagcaaacttctggtgaagatgacttcactgaatcgtgtcagacatttaagaagtaaatgctgtcagtttggtgtaaaatcttccagaatagaaaaagtggcaagacgagtataacttgagtacctagtctagcaagggaattatgataaaatcacacaccaatgtcattcataaaccttgatgcaaaggtcccaaaaaataaccagcaaatgaaatccatcaatacatgaaaactatatatcacaaatgattttgcttaaaagaaaatcagtgataacataataaggatacagatcatatgaccatctcaatttgtagaatatttgatgaaacccaataaccattcatttattaacaaaagtagctgggcatggtggctcgtgctgtgatcccaggacaggactttgggaggatgaggcaggaggactgcctgaggccaagagtttgagataagcccttgcaacacagcgagatcccttctctacaaaataaaaaataagataaaagccaacctcttagcaaattagagtagaaaagaacatctttaatttcataggaggtatttataaaaaaagcataaagtaaacattatacttgataaaacattgaagggttttccttcaaagtcaggaataagacaaggatgtctgccaccatcccttctagtcaaattgaatttaaagtttgtgtagactgatggccttcatggtaccaagtcttcaatttttcctatatccaccccctctgcaatgtgattctacagtttgtctaagatcatatctactctcctgctccttgaacctgggcttgtatgccgattcagcgcctgtgctgcaagagaccttacttgttactgcttattctctaactcttccgccatcgctatgaggacatgtctgggctaatctgctggaaactgaaatatatattagagctgaatcactccagtggtactagctcaagctagtctagattagccaagaggcagcccattcccttttatattagctgagcccaaaataatgactcataagctgtaataaaaaattcttgttttaagtcattgaagtttgaggtggtttgttatgcagcattatggtggcaatgagtcattgacacaaggtacaataaaatgaaaaaaatggtttagaaaagaagaaataaaactattatttatggatatgattctgtatataaaaaggaaaaaaatcaccgggcgcaatggctcatgcctgtaatcccagcattttgggaggcctaggtgggcagatcacctgaggtcaggagttcgagaccagcctggccaacatggtgaaaccccatctctactaaaaatacaaaactagccaggcatggtggcgtatgcctttagtcccagctactcgagaggctgaggcagaagaatcactgaacccagaaggtggaggttgcagtctgcgagatcatgccattgcactccagcctgggcaacaagagcaaaactctgtctcaaaaaaaaaaaaatctataaatacattactaggattaatgagtgagtttagcaaggttgctggatacagggttaatagaaaacaatattaatagcgtttctacataccagcaagaaataaataggtaataaaaaaataaagataacatttataataacaagatattttctgtgcctaggaatagatctaacacaaaagtacaaaacttctataccaaaacctataaattattattattgttattattatattggtgtcttttgatgaaaaaatgttctaaattttaatgaactcaaatttatcagttccctcatggttaatattttctaaaagctatttaatacatctttctttcttttttttttttttttttgagacagagtttcgctcttgttgcccagactggagtgcaatggcgcgatcttggctcaccgcaacctccacctcccaggttcaagccattctcctgcctcagcctcccgagtagctgagattataggcatgcaccaccacacctggctaattttgtatttttagtagagatggggt[136 bp omitted]gaagttattcttccacataacttctaaacactttataaatttgcctttcatgcttaaatctgttaatcctcatggattaacactgttcttgataataataatgattataggctgggcatggtggctgacccctgtaatcccagcactttgaaaggccaaggcgggcagatcacctgaggtcaggagttcaagagcagcctgggcacgatggtgaaacctcatctctgccaaaaatacaaaaaattagctgggcatggtggtgcatgcctttagtcccagctattcaggagcctgaggcgcaagaatctcttgaagctgggaggcagaggttgcagtgagccaagatcatgccactgcactccagcctgggcaacagagagaccctgtctataataataataatggttataggttttggcatagaagttttgtattttttttattagatctattcctaggcacttaaaatagcttcatgttattataaatgttatctttatatttttcattacctatttatttcttgctggtatgtagaaacgctactaatattgttctattaaccctgtat[136 bp omitted]atctccatctcccaggttcaagcgattctcctgcctc[220 bp omitted]tactaacctatctcctttttattataaaatacacatattccaaaaagtgtacaaaactgaaatgttcacctgaatgatttattgtaaagcaaatgccccaaccatcctagccaagattgaaatctgagtatcaggaaacaatatttaagattaaaagtaccgagcacattagagacgtatggtacatgctcaacacgcaaagaaaaaaataacagccacaagcctatatgtaccaaacaactggagagctaaatatttaaggcaaaacacgtataaaaccaaaaagaaattgatcaaaatataactacgatggcaattatcatacaactttttcagaactcacagatctaatagagaaaaaaaaggacatagagaaattgaataatgcaaacaaatacgatttaatagatacttagtcatattagaaatgaacaattttagggaagggagatggatttgtgaaccctggagtgcggttctgcctactcgaggccgctgctgtgtggagacccctgggtgaagccactgtcatcatgtctgaccaggaggcaaaaccttcaactgaggacttgggggataagaaggaaggtgaatatattaaactcaaagtcactggacaggatagcagtgagattcacttcaaagtgaaaatgacaacacatctcaagaaactcaaagaatcatactgtcaaagacagggtattccaatgaatccactcggtttctctttgagggtcagagaattgctgataatcatactccaaaagaactgggaatggaggaagaagatgtgattgaagtttatcaggaacaaacgtagtggggggcggtcattcaacggcttattctttttttattttccctcgatcctttaatcctttatttttaaaaatagttcctttgtaatgtggtgttcaaaacgcaattgaaaactggtaccccatctctttgaaacatctggtaatttgaattctggtgttcattattcattatcatttgttttcattgtgctgatttttggtgatcaagcctcagtccccttcatattaccctccttttttttttttttgagacggagtctcgctctatcgcccaggatggagtgctgtggcgcgatctcggctcactgcaacctccacctcccgggttcactccattctcctgcctcagcctcccgagtagctgggattacaggcacccgccaccacgcctggctaattttttgtattttcagtagagacgggctttcaccgtgttagc[132 bp omitted]cctttttcaggacattgcattttcaggcttgtggtggtgataagtaagatcggccaatgcaggtgttcataatgactttccaactggccctgatgttctagcatgtgattgcttcactcctggactgtgactttcagtgggagatgggagttttttcagagaactgaacagtggaaaaacgacctttccttaacttgaaggtacttttaaaatttgagggtctggaccaaaagaagaggaatatcaggttgaagtcaagacgacagatcaggtaagagtgatgcctaactccaaagatggcttcactgaagaaaaggcattttaagattttttttaaatcttgtcagaagatcccagaaaagttctgattttcattagcaattaataaagcaatacacgtagaaatgaataaggcagaacactgctcttttttatttgttctttttggcctgggatatgggttttaaatggacattgtaccagcttcattaaaataaacaatatttgtaaaaatcgtaaaaaaaagaaatgaacaattttaaaagagaaaataaccttaatgacttggaaattaagaaatatgcttctgtggtgagagggtcatttgagctcaggcgttcaagaccagcctaggcaacacagcaagacacccatctcatatctatatatctatctatatatatatatatatatatatatacacacacacacacacatacatacacacacacttccagataatccttggattaaaaagaagctaagtagaaaattacaaagtttccaggtagcataaaagtgtgtgtgtatatatatttccagataatcctatacacacacacacacacacacaaccccacacacacacttccagataatccttggattaaaaagaagtagaaaattacaaagtttctaggtagcataaaaaggagatttcatatcaaaacctttgacatacagcaaaaattacactttactgaagactaaagatgatgaataaaggaacttaatactccccttaagaaatcagaataggctgggcgcagtggctcacgcctgtaatcctagcacttcgggaggctgagacaggtggatcacttgaggtcaggagtttgagaaatcagaagaataaagacaaaacaaactagaaattgtaattataaagttgacattaataagatagaaaataaagtaaaaatgctaagtaaatccaaatgccacttgtgaatctgattgagaaaaagataaataaaaataacaaaatgtaaaaaatgagaaaagagacacagccatcaaatttagaattttaaggacatatgctatatgaaatcctaggtcaacaaatctgaaaccttagaggaaactgaaagtgtctggcaaatgtaaattactaaaaataatccaagaattttggggaaaattaatggaaagggttggaaagatgagtagagatttactgcacaaatgggctctgggaccagatgggttcagagatgagttcgatttaacctttaaaaagcagatggttctaatgtcaattacaccaggctgctcaaagtgtggcccacgaatcctaagcatcacctgggagtgtgataaatgcaaattaatgaacctgaatccagattcaccacataaaaatcactagcgggcggccgggtgcagtggctcacgcctgttatcccagaactttgggaggccaaggcgggcagatcacgaggtcaggagttcgagaacagcctggccaacatggcgaaaccctgtctttactaaaactacaaaaattagacaggagtggtggtgcacgcctgtaatcccagctattcgagacggctgaggcaggagaatcgcttgaacctgggaggcggaggttgcagtgagccgagatcgcaccattgcactccagcctgggtgacaagagcaagactctgtttcaagaaaaaaaaaaaaaaatcactagaagatggggcccaacgatctgtttaaccagctttccaggtgactttcagcatactaaagtttgagcagcactggcttaggatcacagaaaaaataaagagcgcctcaatttactttctgaagctagcataactttaatgccaaaatttataaaaagtagaaaaaaacccctcatttacaaagacgagatgaacaagctaaatattagcaagtagaatctagaatatatcaaaaggataatacattacacctaagtagaattgatcccacaaggagagttcaatatttaaaattctatcaacaagtccactaaatgctaaaaagccatttggcaaaatgcggcagttctatgaatatactaaatatcattgaattgtaaacttttttttttgagacggagttttgctcttgtcccccaggctggagtgcaatggcatgatctcagctcactgcaacctctgcttcccaggttcaagagattctcctgcctcagcctcccaggtagctgggattacaggcacccaacaccatgcccgcctaatttttgtgtttttagtagaggtggggttttgacatattgaccagggtggactagaattcctgacctcaagtgatccacccacctcggcctcccgaagtgctgtgattacaggaatgagccgccatgcctggccgaattgtaaattttaaataggttgattgtgtggtatatgaatcacatttcaataaagctgtcacagaagactatcttaggcctctggacaaaagggagcttgggagtgtctggtagacatctctgatagcaataactttccttaaccctacccttatggcagatacacctgacagcaataacttaagctgcctctgagaatgagggttgccacgtagaggttgctaggggaggatgctaagtgaaagtgccctatgaactgcatttttttttcttttttttgagacagagtctcgctctgtcacccaggctggagtgcagtggtaccatctgagctcactgcaaccttgcctcccaagttcaagcgattctcctgcctcagcctcccaagtagctgggactacaggcgcccgccaccatgcccagctaatttttatattattagtagagacggtttcaccatgttggccaggctggtctcgaactcctgacctcaagtggtccacctgcctcagcctcccaaagtactgggattacaggcacgagccaccgagtctggcctgaactgcatgctttttgcaaatggttgtagttctcctgtccagtccaccaccactggcccatgctgcaagttcccccaaataagccctgtgttttgtgtgctggctctgggtctcttcttcagcctcttgaacttggtgccatggctactgaagttaacaggcatttggcacgacaaccgatgatcccagcaggaggttggagaaaatcctgtgcacgcagagtcgatgggattggagaggagaatatcatcggggggcatctcgggctggctgtccacgtctgtgtggggcccaacagccactatccttgatggatgaggcccaaggcatgggtacagagatgcccccaaaacactgaagggtctggaagagctattgcaggaggtggatctaactaagcaaaagttagatgcctgagctgtggcagctgcggttggctggccactcctgactgtgctctgagcagcctcgggggccgggctcatggcgcaggtgaaggtgcatccattacaagatgaactgcgatgacaaagagatgcctaattagatcagactgaaacatcagagaccgactgtcctgcctgcaggcacgggatgacaaaatggagagaccctggcttgtcaggtatggtccatttgaaaagctgctggctgctatgtcaatgagttagggccctcatgactaaatcatcctgggaccctaagttctgggaccccatggagagctctagtggggaagagagtgaggcctgggatgagctcatggaggtgcccatcctctctgcacgtttgctggtcaacaccaagatgaaagccgaccaaccacagacatagggggtcaccctgcaagacttgcccctgcctggaagacaccatagtgcgggattccacggctgtggagttggtggagctgggaactaggttcaggaagaagggcagagagtcggtcacagggtggcttctctgtctatgggacatggaacagagatgagtgaaatggcatccatcaccaaccatccagccctgaggcggtgcctcgatggcaccaataatgacgatcgggccaccccctccttagccgggtggttgcaagctgcaa[211 bp omitted]gaggcagaagaatcgtttgaacccgggaggcggaggttgcagtgagctgagatggagccattgcactccagcctggacaacagggcgagactccatctcaaaaagaaagaaaggaatgtccccacatctcctttgtgatgacagattatggaggaattgagggacatcctctgggaattaggggtgatgcttgctatctacactgagcattaccgaggccctgacaaggagcttttcactgcgggcatgagaaatgccatcttacagtaggcacactaccaatggtgtggcacactggcgtctatcttgagtcccttcataggaatcacttgaacctgggaggcggaggttgcagtgagccaagatcgtgccactgcactccagcctggaccacagagtgagactccgtctcagaaaaaaaaaaaaaaggcaaaaaaccaagaatgcatccaggaggcaaggtggcttacgcctgtaatcccagcactttgggaggctgaggtgggcagatcacgaggtgaggagttcgagaccagcctgaccaacatggtgaaaccctgtctctaccaaaaataccaaaagttagctgggcacctgtaatcccagctactctggaggctgaggcaggagaatcgcttgaacccgggaggtagaggttgcagtgagccgagatcgtgccactgcactccagcctggtgacagagtgagactccatctcaaaaacaaaacgaaacaaaaaaacaagaatgtacaggctgttcccagcggatactggagctgaatgcactctcgtatgtggtgacatccgtggttccagtggcctataacaatagatggtcggtgggggcgggggtcgtgaaagtcagacaggttgagctagtattacaagttaggagactgctgcccaaaccctatttagtatacagagctcctatcccagattacatcttgggaagggctgtctcatcaggactgtgaccctctgaattgcgactgagttaggatggtgaggcgcgtgatcaaggggaatgcgaaatggacaccagcacagct[138 bp omitted]acggtgaaaccctgtctctactaaaagatacaaaaaattaaccgggcgcggtggcgggtgcctgtagtcccagctactccggaggctgaggcaggagaatggcgcgaacccgggaggcggagcttgcagtgagctgagatcgtgccactgcactccagcctgggcgacagagcaagactccgtctcaaaaaaaaaaaaaaaaaagaaaagaaaaaagaaacgacaacacctgccaggaggtcatgatgagatcatagggactgaaaaggaaagaagtctgggtagacattataagaccagtgaacagcccatacaatagccctgcatggcccatgtggatgcctgatgggacacggagaatgacatattactgggagttcaacaaagccgtccccctaatgtatgcagctgttctcatatcgcctcctttcttatgaggataagagagggactgcacgcacctcattttgtcattgcattcacctggtatattagtccgttttcaagctgctataaagaactgcccaaaactaggtaattcataagggaaagaggtttaattgacttacagttcagcatagctggggaggcctcaggaagcttacgatcacagcagaaggcaaaggggaagaaaggcaccctcttcacgaggccgggcgaaggggggaagagccccttataaaaccatcagatctcgcgagatctcactccctgccacgagaacagcatgggggaaaccgccccaatgattcaattacctccacctggtgtctctgacacgtggggattatagagatttcaactcaagacgagatttggatggggacacaaagcctaaccctagctgggcgtggtggcgggcgcctgtaatcccagctgctcaggaggctgaggcaggagaatggtgtgaacctgggaggcgaaagttgcagtgagccgagaccacgccattgcactccagcctgggcaacagaacgagactccctctcaaaaaaaaagcctaaccttttcacctgggaaggagaacaatatacctttactgtcttgccgcggggatatttccatagcctcactatctgtcaacgcctagtggccacagacctcagtagatggactaccctggagagggtacatgttttcctttacattgatgttaaattctgagtcttttgccagctaacttctgagtctctatagccctcaccttgctgtctcacttggttaacagaggatgggcggtcaatgcagacaaaggcagggtccaggcttatcagtccaatacttggtgtcatctggttgggtaagactaacggtgttcaatttgccattctacatatggtgcaggcctacccacatcctacaccaccaaagtggctgcaaaccttcttagttcttctaaggccgtggtgtccttttatttcccatttggctcaactccttaggccactgtaccacttagtcaagaagggggccaactgggaccagtggcaaaggcaaggacacaaacttgtacctttaggattctggttccagctatggaaggggactgaagttacagtgtcagggagctataattctgcactacgtgttatgccttacagcaagtggaagatgttccaaaggggttcccatgctagtacatacccagtaccccatagtaggttagctgggattacaggtgcccgccaccacgcccacctaatttttgtatttttagtagagacagggttttgccatgttggccaggctggtctcaaactcctgacctcaggtgatccgcccaccttggcctcccaaaatgttgggattacaggcgtaagccgccacgcccagccagcctgtgcattcttaggtgaccaatatatagttagctagctctatatgtggccgccagtctccagacactcagccaccattgctcttatcgggatcctgaggccttagcctttatcctagtcgaaagtaggacaccttccagaaaccaaaatctgggaatgcccagaaacagattgtggccaaatggcacgcatgcctgcaacagaggagtacacgaactagcacagggttccgtttgctgcttggccctgtcacctatgtgacagctgaaggacagtctttgacaaggcactgagcctccacatattccctcctttatataagagggacaggccccaattcctgaccaggcctggtacacagatggcttgtcacgaggcaatccttccacctgtatccagctgtccactgagagtatctggctcgatacaggcaaaggacatgtagccaatgggctgagctgcctggatggtttcttctaggagccggacccaacagtcctgtgcactgacatctgggcaccatctttaaggggcccaccatgtgcctactacaaggagaaacacaggattggatggtagcaggcagccccctttggggggctgatatagaagaacattctccactgcacctgggggatgcatgtaacagtctagcgtctggatgcccacactgcataatatccctattgtcttactccagcctcatgtgacactttgtagagagggggccaacctatttggtattgcaaaccaagcaccaggccactctcggggtgatgctgtctcagaaggacacaacttcctgtttcttgtaaaatgaccatgaggctgggtgcagtggtacatgcctgtaatcccagcactttggaaggccgaggtgggtggatcacctgaggccagcagtttgagaccaacctggccaatatggcaaaacgccacctgtactaaaaacaaaaaattagctgggcatgatggcgggcgcctataatcccagctacttgggaggctgaggcaggagaatcgcttgaacccaggaggcggaggttgcagtgagccgagatccagctactgcactccagcctgggcaacaagagtgaaactctgtctcaaaaagaaaaaaatgaccatgacttgccccttcttgtactcactaaacatctcacttttcacccatagatggtatgcagcaaacctcttgccagctgagcacagacggtggtctctctccagaacaaaacagactgttgggtctgcagagagctgcccctctcctccactgcgggcctgccgtggtgcctcgcagcagttaacctgagtacctgaagccacttttatattcattattttttctgttgtagtttgtattgctgctgtggtgtctggctgcaatgctcctccgcatacctggccccagggaaatggtggaagaacggtacaagaatgtgagggccattcaaaggtatgctagagtggccaggtcgcagtggctcacgcctgtaaacccagcattttgggagggccgaggcatgtggatcacttgaggtcaggagttcaagacaagcctggccaacatggtgaaaccccatctctactaaaaatacaaaaattagccaggtgtggtggcacatacctgtaatcccagctactcaggaggctgaggcaggagaatcacttgaacctgggaggcggaggttgcagtgagccaagatcgcaccactgcactctagccttggcgacagagtgagactccgtctcagaaaaatgaaaaacaaaaacaaaaaaaacacagcaaggtgggtatgctggagtgagggtatatggtagacgcacctggcagcaataacttaagcacaccctgaggataagggctgccgcatggaggttgctgggggagggtgctgagtgaaagtgccatataaactgcatgcattttgcaagtgggtgtggttctcctgtccagctcatcaccactggatcaccctgtaagttatctcaaataaaccctatttctcgtttgctagccctgggtctcttcttcagcctcttgaacgtggcgccatccctattgaagcgtcccgcatgtcagggatgcaaattagaaagcagaattaggccaggtgcagtggctcacgcgctttgggaggctgaggcgggcggatcccttgaggccaggagttcgagcccagcctggccaacatggcaaaacccctatctctactagaaatacaaaaattagctgggcacagtggtgtgcgcctataatcccagctacttgggaggctgagacataagaatcgcgtgagcccaggaggtagaggttgcagtaagccgagatcgtgccactgcactccagcttgggcaacagagcgagactgtctcaaaaaaaagaaaaaaaaaaggctgggtgcaggggctcacgcctgtaatcctagcactttgggaggccaaaatgggcagatcatgaggtcaggagttcgagaccagcaactctcgagacagggctacatgtgactctcgagactgtctcgagactgtctagagacagggcaacatggtgaaaccctgtctctactaaaaatacaaaaatagctgggcgtggtggtgcacccctgtaatcccagctactcagaaggctgaggcaggagaattgcttgaacctaggaggcagagtttgcagtgagccaagaccgagacactgtactccagcctgggcaacagagcaaggctctgtcaaaaaagaaagaaagaaagagagagagagagagagagagagagagagagagggaaacacactaagagagaaataaaatattttttctttctttctttgagatggtaagcccctacttttcaatccccctctcccaagttccacctccaaaactggaccggggatggtggggaggtaggtgggaggggccttgaggcagaagggaggatgagtgccctggttcccaaaagggaggaggttgaagacccagactatttgatgagaaggaggagcccaccgccttctctctcccatccccacattacccgattcaatagtgcaagtcttcaagcagatagagcatttggaatttggggggtggatgggctggcctaatagggcacaggagccaatgggtgatgacacagaggtgcacgcccctccagccctcctatcttcaagcttgaagagccagacttcagaggtctggaaacttcagatgcctctgctctttcctttctgcagatccacctcttgagtcctgcctgccaatggttgggggtgtcttcttttcctttatcactgaaacttacccgtgggctctaagcaatctaaaagcctgagatctctgagcatttaagggaaacccattccctggatctttgggaatcccaatcacctctgtccacagcccccatccccagcaggtaactgacaggccccccagtctccttttggggagtacttcagcaccctcatggcactaccctcccacaagttcttaaagacccactcagtgatcatccactgggcaagttcagttgatttgaccctgggataaaaaccagtggtgcccagtactgagcagaaatgggactcttggtgagctcagtgaaacagcttgttagtaactggttgtggcactgatttacagatgtactcagtccacaacacaatgttcaaaccttgagtgcaacctctttttagaaataattttagacctataataggattatcatgtatcagtagcaagcacattaatatcttccccatctttgttgaagtcaccatttcccaggtttcccttggctaaaggccagcccgtggataatgcaagcctggtaatctagtatctgagtttgccagagcaaggggagggcaggaactcagggctggacatttagctttagaaagactgtgatatggtttggctgtgtccccatttaaatctcaacttcagttgtatcttccagaattcccatgtgttgtgggaggaacccagggggaggtaattgaatcatgggggctggtcttttccatgctgtctcatgataatgaataaatctcatgagatctgatgggtctatcagggatttccacttttgcttcattttctctcttgccaccaccatgtaagaagtgcctttcacctcccgccaggattctgaggcctccccagccatgtggaactgtaagtccaattaaacctttttgttcccagtttcaggtatgtatttatcagcagcatgaaaactaatacagtaaactggtaccagtagagtggggtgttgctgaaaagatacccaacaatatggaagcaactttggaactgggtaacaggcagaggttggaacagtttggagggctcagaagaagacaggaaaatgtgggaaagtttggaacctcctgaagacctactgaatggttttgacaaaaatgctgatatgaacaataaggtccaggctgaggtggtctcagatggagatgaggaacttgttgggtactggagcaaagatgactctttattatgttttagcaaagtgactagtggcatcttgcccctgccctagagatttgtggaactttgaacttgagagagatgatttagtgtatctggcagaagaaatttctaagcagcaaagtattcagaaggtgacttgcgtgctgttaaaagcattccgttttaaaagggaaacagcataaaagttcagaaaatttgcagcctgatgatgcagtggaaaagaaaaatccatttttgaggagaaattcaagccagctgcagaaatttgcatgagtagcaaggagcctaatgttaatcccttagaccatggggaaaatgtctccaggccatatcagagacattcatggcagcccctcccatcacaggcccagaggcccaggaggaaaaagtggttttgtgggccaggcccagggtccccatgcagtgtgcagcctagggacttggtgccctgtgtcccagccactccagccatggctgaaaggggccaacgtacagctcgggctgtggcttcagagagtagaagccccaagccttggcagcttccacgtgatgttgagcctgcgggtgcacagaagtcaagaattgaggtttgggaacctccgcctagatctcagaagatatatggaaatgcatggatgtccaggcaaaagttttctgtaggggcagagccctcatgcagaacctctgccagggagggaaatgcagaagggaaacgtggggtcagagccctcacacagagtcagagtccctactggggcactgcctagtggagctgtgagaagagggccactgtcctccagaccccagaatggtagaaccactgacagcttgcaccctgagcttggaaaagccacactcaacaccagcccgtgaaagcagctggaagggggactgtaccctgcaaagccacgaggtggagctgcctaagaccatgggaacccaccttttgcatcagcatgacctggatgtgagatctggagtcaaaggagatcattatggagctttaaaatttgactcccctgctagattttggacttgcatgggccctgtaacccctttgttttggccaatttctctcatttggaatggctgtatttacctgataccagtacccccattgtatctaggaagtaactagcttgtttttgattttacaggctcataggtggaagggacttgccttgtctcagatgacactctggacttttggattaatgctgaaatgagttgagacattgggggactgttgggaaggcatgattgcttttgaaatgtgaggacatgagatttggaggggccaggggcagaatgatatggtttcactgtgtctccatttaaatataaacttcaattatatctcccagaattcccacgtgttatgggagggaaccaggggaggtaattgaatcatgggggctggtcttttccatcctaatctcgtgatagtgaataagtctcatgagatctaatgggtttatcaggggtttccacttttgcttcttcctcatttttttctcttgctgccatcatgtaagaaatgcctttcacctcccaccatgattgaggcctccccaaccatgtggaactgtaagtccagttaaacctctttttgttcccagtttcaggtatgtctttattagcagtgtgaaaatgaactaatacagactggaagccttgtgacaggaaaactgaacatctgagacatctataggaaaaaaagatctgcttacatccagtccttggagttccagtagactgatttattcaccaacagcattgctcctccagctccattccaggagacaggcaccccagaagtagcaggactggtagacatcactagtattgtatatgtgttgtgcatgtatgtgtgttgaggaagaggatggggaaaacaatgatggtggtcaccaggtaagatgggacccaggaagggattgcaagtccaggccccatgaacacccccaaagaatgcccctcctcttggaaataaaagtggttctggatccagggagatcaacagttgcaagctgatattaagagttgtctattggatctgttctaagggatatgttatgtgaagccaaattaatgaagttaggaagtcacattacaagttgatgggtactttgtttcatcaacttgtagaatttcttccttttgaacctctttactgggtgttagctggtgacttaggggtagggatgtggaggctgtcataggcccgtctccgctcttgggcctgaagggaatcctatgtatgcggcagtatacaaagtatgcagggatggggaggatgacaatggcaaaaagggtgatcatcaagagcagtgcccacggtgggtatggtcgaagcacctcttttgactgtggagagatgggaaaagggttcagaatatcaaaatccccaagagaaaaggaagagttgtggaggggaaggatgggtggggaaccaaagcagaaaacccatgagtcttcgggcagtaagagaatgagatgactgggttctttcacccagagtgaattgaaaggtctggcccctactcccaaaggggttctgggtcctgggggaggctcacggtgcttgagtcccaggacatgtaggtgatcggcttcatacaaagatgaaccatcatggtcacaaagatgattagcagcacaactggacacagatggggccacagccaaccaaagatgggagagatggggtggcccaacaggatcgtcaggtctgcaaggaacctggagaagggccaccagagtgtgggatgcccagttaggcctcaccaccttggaggcagggccagcccaaccttggcatctttcaaacattctattgtatctctaatctcctgtttcatctcaagtcttgtcctctctcatcttccccctagtcagtctgtcttctatcctaacccaagaaacttttccaaacacccctctcctgctcaagaactttccatgggtatccaatggcctcaggagaaaggccaagtctctttcattcatcccataaatatgagaatgtctatgatgtgccaggaactcttctaagtgctggatatccagcagtgaacaacacagataaaataaagtggcatttggcccttggtgaacttatctagtttatttcagccacctatccagtctcctttagtacatattctcaatctcaataaatatacaagtggggtcttttggtctagggtgcccatcaccctatctccacctattcatctgtccaggctctgctcaagcatcctcttctctaggccaccttccctaactctccagtcttccttaactaaccatctatgcccccggagtttccctggctacctctactatagacttaccaccgggtactgggattttctgcttatatacgtctttctctttggactctgagctctttgagaagagtatctcaatgtaagtcattcatatcccagtaccacaaggctttcctgacacaaagtctcaagaaaatgtttgttgggtgagttaataaatgagtccataagtgagcaaactgactccaagaaccactatcagatgaaaatgctgaggctttcacccctgaattataccaggaactcttctaagtgctggatatccagcactgaacacagataaaagaaagtggcatttggcccttgggaaacttatctagtttatttcagccaactatccagtctcctttagtacatattctcaatctcaataaatatacaagtggggtctcttggtctagggtgcccatcaccctatctccacctattcatctgtccaggctctgctcaagcatcctctcctctaggccaccttccccaactctccagtcttccttaactaaccatctgtgcccccggagttgccctggctacctctactatagacttacattccacagctatatcttccaggtctcactcccagattatcttgttctctttcccaggtagctctaccttccagaatcagaccacttctcttaatccacaactcttctacttttgaccaagccattcttagctctcacttgaaatattacatagctttcaccaggcggggtggctcacgcatgtaatcctagcactttgggaggctgaggcaggtgatcacgaggtcaagagttcgagaccagcctggccaacatggtgaaaccccgtctctactaagaatacaaaaattagccgggcgtggtggtgaatgcctgtaatcccagctactcagaaggctgagggaggagaattgcttgaacccgggaggcggaggttgcagtgagctgagatcgcaccactgcactccagcctgggcaacagagcaagactccatctcaaaaagaaagaaaaaaagaaatattacatagcttccaactcttatcctggcttcactcttgactcttcctggtctgttctccagacagcagccataaatacctttttaaaaaacaaatctaataatggcactcccacctgaaaatgtcattctcctactcaaaaccctccaatgcttcatctgccattctgcatacaaagctgagtcctatcgtggcttacaaaaccctacatgacttggccaccatcacttctctagccccatctcctaatatcttctattccagcctctctgacttccttgtttctcaaaaactctaggcattatgcttcctctggccttggtaatttctgtttccctgcagggagcactttactcaaaatcttgtcatgactccctccctcctatcattcaggagtctgctcacatgtcaccttatcggaagggccctccctgaagtcgtatgtgacttggtgcccacacacactcccactatgtgccatctgacctcatcctttgattcttcctatcgcctgtatttattctcaacgtttttattctttatttgctaatctggttattgtctctctagaccactaaaatgtaagctttctgagaataggaatacttcttttattcaatgcccctatccctgatgactaaaatagtgcctggcacatattcagcacccaaaatatatgtgaaaatggatgaatgaataaaaagatttcccagaagactctgaacttaagggtccctatgtcacactaggtgggttgacagtagaggcaacaaaaaaggggtcacccttccctatagtcccatgctttgtgagaacctgggcttaggacatcacctcctggccccataggcccaggatacagccatggtttcaaatacgacaacgacgatgatggggaagactatccagtagtcactcagcagtctgatgaagtagctgcctgaaggtcgagtgaagaagaggccgcacacgaacatgagcaaaaagactcccactggagaaaacatgagatctggatcaaggttagaagtcacggctgggtgacaagggctaagtagaggccatagaccagggctggtggcagacccagtggtagccgggcgagggggcttacatgtgtaatccaagcattttggggagcctaagtgggcagattccttaagcccaggagtctgagaccagccaggcaacatggtgaaagcccgtctctacaaaagctacaaaacttagccgggcgtggtgatgcacgcctatggtcccaactactggggaggctgaggtgggaggatcacttgaacccaggaggcagaagttgcagtaagccgagatcacaccactgcactccagcctgggctacagggaccctgtcccaaaaaaagagtcccagtggtgtcaggggtcagggtcattgttaggagtagggcctaggtcagagtacctatgagcagctttgtatgtttcctgaagaaagagaaggtgtcctggagtggagtaatgatgccctgcataatccctattgcgctgctcagccccatggccagcaacatcaggaagaagataaaagaccagaagacagacggaggaaggaaggacatggcttcaacaaaggacaggaatgcaaactttgggccctcgctagcctgcaaagagaacaaagaggtgttaaagtgtcattgaactaaacaataacaaaaaaatatagacaagtatacattctatcttccctggaaaactcctgaaaatccctggatcactgagaaaatcagatgtccaagctaaccccctgacatggaaaatcaatccacctagcattatccatggaaggccattccgcaaagtatagtactttgtattactgagagccacagatgattctggtgcttccgggatttttgctggtgctaataaaagctaaaatttctgttgtgctaaaggctttcaggaactctaggctcccccctcagctatgtttactgaccttaagaaactgagtctctatgttgcactcagtcacctcgcggagaaccatgcttttgatgtgctggggaaggccactgagccaggcattgtagatggaggttgggttgtaaagcaggttgacagggggcttggcatcaggaggcagtttccctaggtttatcagctttaaaagtatttcagcattcctggggatagagggttgaatcaaatcgaaccatttggcccagtaggagatagtctccttttcccttatcttcaagataaaaaaggctatcactggcttagcattactgatctgggtaagatagagcctgggatgaatcctagaaggcacccgccttcagggacgtgaattcgtttgtgtaatcctggagaatttatgaccatgggagagcctaggagaagcattttctacagtcttcttggggactctgtggtctctgctctagtgatgggatttcttatacgctgtctaccttccctctccactgagactaacgggtaagagccaactttctaaagttcctattacagcatgtccgggagcacacagactatgatcataatgtcccatggagtcgtgctgtgtggcagcaactgcttgttcgactttttgatgtgagccctgctgaccattttggcctcatatgtccctacggccctcttcacattccatgttctggccagatttaactacttaccgtgtcagggcccatcataccccatcacacacaataccaactccacccccaccaccattcttcacttggctaactcc[134 bp omitted]gaggcaggagaattgcttgaacctgggaggcagaggttgcagtgagccgagatcgcaccactgccctccagcctgggcgacagcgagactccatttcaaaaaaaaaaaaaattcagctcattgctctgtaagaactgcaatggacagcttgccaaggttcactgataaaagcaaaaggcaagcaagtagagtttgatcacattttagaaaataaaatactatatgctattccagtaataagctagagatttgaaccaattttctcatcggaaataatttaaaaggctggaagatatttttaaatcttctaacaaaataaaaatgttgacaagataataaggaattatcaggcaaacattgaagtacaggcaaagcagtggagaaaggggacttccaaagatactttgtcccaaagatgtatgccaaatacaacaaactggacctgcagtttccaattttatgacttttcagatacaaaagggggccatggaggccagatataaaacaccagagcctgcccaaaataaggatcagaatagaagttcccctcttaaatctgacacttcaaagggctacaccttcacaataaaaatgaagcagaagcttgctcctggcccttctacacaactgggaatgcaaggaaagctgtttcagaaatgatctacagatttgatgcaatcccaattaacaccatagcaggctttttattttctttttctttttttttgagatggagcctcgctctgtcgcccaggctggagtgcattggtgcgatctccgctcactgcaacctccgcctcccaggttcgagcgattctcctgcctcagcctcccaagtagctgggacaggcgtgcgccaccatgcccagctaatttttgtatttttagtagagacagggtttcatcgtgttggccaggctggtctcaaactccggacttcaggtgatctgcccgcctcagcctcccaaagtgctgggattacaggcatgaaccaccacactcagtctgggaaggtaattctaaaatttacttggagaacaaagatctacaatagtcaaaacgattttggaaaaaaaatagcacagttggagaactcatacaatctgattttaaggtttactgtaataccttagtaatcaaagcagggaggtattggtgtaaaaaaaatagacatgttaactaatgatactgagtagagcccagaaacatattgtggacaactaattgtcaacgaagataccaaggcagcttaataagaaaaggatagtcttattaacaaatagtgctagaacaactgaatatctaaatagaaaaaaatttaattttgatccttgcctcataccttatacagaaatttatgtgaaatagatatctaaacagaaaaagcaaaaactttaaaacacaggagaaaaatctttgcaatcttggccaggcgcggtggctcatgcctgtaatcccagcacttttggaggctgaggcgggcagatcacttgaggtcaggagttcgagaccagcctggccaacatggtgaaaccccatctctactaaaaatacaaaaattagccaagcgtgatggcgggcgcctgtagtcccagctacttgggagactgagacgggagaatcacttgagcctgggaggcagaggctgcagtgagccaagatcgtgccactgcactccagcctgggcaacagagtgagaccctatctcaaaaaatatatatatatttgcaactttgaggtaaacagaactgtctgaggatgtaaaaagctcaaaacatgaaagaaaattgataaattgggcatcatcaaaattatgtcttttcatcaaaaggcttcattaacgaaagacaaaccccagaatgagatataatatccacaatatgtacaactgacaaagaacttgcatttaggatatataaagaatgcttacaactcaataatttcaccgcccaaaaaaaaccctgatttttaaaatggacagtagacttgaaaagatactttacaagacaagctctgtaaaaggccaataagcactttccaaggtagccaacattagtagtcctgagaaacaggcaaattaaaatcacaatggcataccacaccacacatctgccagaatggttaaaattaaaaagcctgatgtcatcaagtattgacaaggatgtgggacaaccagaactctcataccatactagtaagaatggaaaactgatttaaaaccactttggaaacagttccacaaattcttatgaaattaaacataccgttaccacgtaacccagtgacccaatgatccttctcttaggtgtttatccaagagaaatgaaaacatatgtccatacaaggacttgtacatgaactctcaaagcagctctacttgagacagccctaaactggaaacaactcagatgcctctgagtaggagaatggatgaagaaattgtggtataatcataaaatggaataatacttaggaataaaaaggaacgaacctccaatacatccagtatcatagatgaatactaaaaacatgctaagtgaaagaagtcagatataagaatgcatatagtatgattctacttactctgaagaaaaaaaaagacaaatctaatctatgatgatagaaaacagattggtgattaattggggccaggagtgagaggaacataggtagaaaatatgagagtttctaagacctagatgatatagtaaaaaggtctaacaaatgagatgacatggccagtgagtcagagacaatatgtgaacaaacaatggctgagaatttttggaactaatgaaaaaagtaatccatagatgcaagaagccaaaagaatcccaagcaaaataaaaggaattccccattagatatattacagtgaaggtgtagagaaacaatgttaaaaggtacctgtgcattggcaaataatttatgaattaaaagtccttaaaagcacttgcaacaacaaaaattgacagataagtgggatccaattaaactgaagagcttctgcacagcaaaagaaactcaacatgaaggagagaaaatatttgcaaactatgcatccaacaatagtctaatatccagaatctatgacaaacttaagtaatttgataagcaaaaaataaataaccccatttaaaaaatgggcaaaggacatgaacagatacttctcaaaagaagatatacatgcagccaacaaatatatgaaaaaatgctcactggtgtgtttctcaccacaccaatcagaatggctattaaaaagacaaaaagcaacagatgttggtgaggctgcagaggaaagggaatgcttatacactgttgctgggaatgtaaattagttcagccactgtgggaagcagtttggagatttctcaaataacttaaaagggaactaccattcaacccagcaatcccattacagggtctatatacccaaaggaaaataaatcgttctaccaaaaagatacatgtactcatatgtttatcacagtactattcacaatagcaaagacatgaaatcaagctagatgcccaacaatggtagactggataaagaaaatgtgatacatatatactgtggaatactatactgccatgaaaaagaacaaaatcatgtcctttgcagcaatatggatgcagctggaggctattatcctaagtgaattaacataggaatagaaaacctgccgggtgtggtggctcacacctgtaatcccagcatttgggaggcagaggcaggcagatcacgaggtcaggagatcaagaccatcctggctaacacggtgaaaccccgtctctactaaaaatactaaaaaattagccgggcatggtggtgggcgcctgtagtcccagctactcgggaggctgaggcaggagaatggcgtgaacccgggaggcagaggttacagtgagccgagatcgcacctctgcagtccagcctgggcaacagagcgagactccgtctcaaaaaaaaaaaaaaagaaagctgaaagatgccagaagcgggctcatgcctgtaatcccagcattttgggaggatgaggcaaaccgatcacttgatgtcaggaattcgagaccagcctgagcaacatgaggaaactctgtctctactaaaaatataaaaattagcctggtgtggtggcatgtgcctgtagtcccagctactcaggaggctgaggcacaagaattgcttgaacctgggaggcagaggttgcagtgagccgaaagcctgggtgacagagggaggcttggtgtaaaaaaaaaaaaaaagaaagaaagaaagagaaagctgaaagatagtaggctatcttcaatgtgctaggaaaaaaaaaaaaaaaaggcactgccaagctagcaatctatatccagatacaatagatttcaaaacacagtgaaagatattttcagaaaagaaaagtag[138 bp omitted]atggtgaaaccctgtctctactaaaaatataaaaactagccgggcgtggtggtgggcacctgtaatcccagctacttgggagtctgaggcaggaaa[135 bp omitted]ccaggatgcaagatagaataaagatcaaagaaagcaataaataggaagtagtacatctaattgaacattaactatataataaaacaataatatctttgcattttagcaaaataatatgaaataaaaatacatgaggtgcatgcttgtaatcccagctactcgagaggctgaggcaggagaatcacttgaacccaggaggcaaaggatgcagtgagctgagattgcaccactgctctccagcctgggtgacaaagtaagactccgtctcaaaacaaaacaaaaacatgatataacattcaaatgtaagttaggaatgcatgtaaatggatataaagagttttggagcccttatcttgaaagacagtgaagtactgattacctttagacatcgataaattaagaatgcatattgtgaattctggggaaatcactaaatcactgaaagaacagaaaacagagtggataacttccagactagtggaggaaaaaaaaaatggaatgataaataactactaagtcaatccaaaagaaggcaagaaaagagaaaaaacaaaatacagaccaggagaaacaaatagcaaagtaagatgggagacagagccaattatttcctatcatgatggcagagaaagggatccagcctccctttctctataaagagcaacaatttggcaactatccttgaacaacaattactctgggccgggcgcggtggctcatgcctgtaatcccagcactttgggaggttgaggcgggaggatcacttgaggtcaggagttcgagaccagcctggccaacgtggggaaaccccgtctctacaaaaaatacaaaaattagctgggcatggtggcacgttcctgtaatcccatctacttgggaggctgagacaggagaattgcttgattccgggaggcggaagttgcgtgagccgagatcaggccactgcactccagcctggaagtcagcgagactccatctcaaaaataaataaataaataaaataaaataaaaattactctggaagaattgagaagtcggcttcagctgacttttagtgggagaaagaaccctagaaaaacccatacagaaagggtggaaagaacaattccattttgcccacatcaccccatcccccgagccagcactgctcagcatggagagggaattccctggctcgcataaccctctttcagggataatgagagcaggctataccaccagcttccctagtgttttgggacactgcccaaccagcttcagtttcactccattcacatttccgtggggactggcattgccgagacttacggagataatggggaaccaagaagtgggacaggctgtcagtatcagccatgctggtgggagccacagcgccccctagtggcctgctcaacacgggtctctagcacacttctgtactgaggacctcaacagcactcctggccactgtgcagctccccacagttttcaccaccaaggacaccttggtgttaccaatggctgatgccagcaccattttctgcagaggaaccaagcagctttcacagctgaggaaaccaactgccagcactgcagcagcaaaagccctgtagttttttccaccttcacagtctccaggtgcctggccctctaatttctccttcctctgtccctgaaaccacctaagctgttcaataccatggtcacccagaccagacccagggactcaccccagtggccatcgcattctctgggtgcctaagccaatacccctcctctatggagtcaccccagctgctgcctctacaagtgctctgagccaaggacccagcacagctaccatgcatgtgcctgcacacagccatgcctccccatccccaggttctaactccagcatcacgtttgcaccctcagctaggccccgcggctgcatgtgcacacacgcctccagctcagccctgcaactgcccacgtacatgcagatggactgacctctgtggccagactgcagcaggcccctgcagttaggcacaagctgtcaggccccactgccacatgcatgcccttagtcaaccccagcccctgcctctgactccaccccttgccaccattaatgagcctgcaactagcctctgctgccatgcttgtgcctacagccagcctctgcagcagagtgtgtgcacaccactgaccccagcctccactgctgcgagtcctggcccctagatgctaggcaagaggcacagctgaggtcccagaaaactctgtgggaggttcacagccactgtggacctcccacagctgttgccaccaaggaccatgcaggtatcaacatcacagcccccagctgcctgtgctaacaagactctgtgtccctccaacctggacccaccacacgcacccccacccacagttggcactctgtgccactggacccagtgccagagagcaccactcttctccccaaaaaaagcatttgaagttaatgcttcttcaaatgcttttctcaagactataaaaatcatgaagaattggagaatcatgataacaccaaaggaaaacaataaacttccattagctgactccaaagaatagcagatccactaattgcctgacaaagaattcacaataatggttctaaagaatctcagtcaattataaaagaacagagaaaacaatttaacaaaatcaggaaaacaatagaacaacgaaagaagaggctaaacaaaggcactgaaaatatgaaaaagaaccaaacaaacatttttgagctgaagaataacaataaacaaaaaatacaatagatggcttcaacagctgactagaaaagcagaagaaagaataagcaaattcaaagacatcattttaaatcatccagtcagaggagaaaaagaaaaagaaatgaagataaccaaagaaagtctacaatatctatgggaggccatcaagagaacacttacataacaagatttacagaggagaagagaaaaggacaaagtttatctttaaaaatagctgaatacttccctaatctggagaaagatacaaacatccaggtacaagaagttcagaggtctctaataaaattcaacccaaagaagagttcattgagacatattataaacaaattatttaaaactgaagacaaagaattctgaaagcagaaagagaaaagcatatcacatataagggagccccagtacaagtatcgacacatttctcaacagaaatcttgcagtccaggagagagtaagatgatatattcaaagtgctgaaaaaaaatctgacaaccaagaatactttaaaaagtatgtaggccgggcagggtggctcatgcctgtaataccagcactttgggaagccaaggcaggcggatcatgaggccaggagttcaagaccagcctggccagtatagggtttagtagaaaccctgtctctactaagaatacaaaaattggctgggcatggtggcgcccacctgtagtcccagctacttgggaggctgaggcaggaggattgtttgaacccgggaggcagaggttgcagtgagctgagatcacgccactgcactccagcctgagtgacagtgtgagactgtctcaaaaaaaaaaaaagaaaaaagaaaaaagaaaaaaagccacaccattagaactggtctcatctaacgcccttcagtcatttgatttatacaagtgataaggtttggggcacaaaactattatcatattactattaattttactttatatttgccctttttaaaactttgtatctgtcacttgttaaatttttacagaagtacaactcctaacaaaataatgctggcccagccaaacactttgagatgataacaaaagactatggaacagacaaaattgaacttcataatggacctcagatagacttagcctaagagatacccccttcaaatgtcccttgttgctcaaatgtggctacaagagtttgacactgactccaagtcacccatcattcccctcaatgtgacatgagaccagcaactgggacaggcccatcatgacattgagggacaggaaaacccaaatatgaatgattgatcagtgatgcttttggagaaagatcttgattaaaagaggaaatgtgaacgttatcagaataaaatggagtcactaatgttaagaaagccctagcaaattgagtcaaggaaggccataaagagagggttctcacacttgtatgtctgattagaaaaacaactacaaaaactataaccacgcataaaggccactgcaaccttacacacacaaaatattcctgcagaaacatctgcccaacaaacgcctatccaatcttggactggtgtcacccttgttatcgatctctgtagtcaaggaaaattatttcaaaacaattatgttatcctcctcatttttttcctttaaaaacctttgttggctgggcgtggtggctcaagcctgtaatctcagcacttcgggaggctgaggtgggcggatcacctgaggtcgaaagttcgagaccagcctgaccaacatggagaaaccccgtctctactaaaaatacaaaattagccaggcgtggtggcacatgcctgtaatcccagctactcgggaggctaaggcaggagaatcgcttgaacctgggatgttcaatgcactccaccaggtgagagaaaagaattttaatatatacaactggaaaatgactacatatccagaacatataaagaactccatagaaaaagatagatcatccaatattttttttaaaatgggcaaaaatgaacttgaccacacattttgctttaaactatgacaatacaagtatttgcacgagtgaggtaatgagaacttccatacacacatttcatatacatacaattataaattggcacagatactatggaaagtaatttggcatcatctgtgaagttgtagatatatgtggtagattgaataaatacagccacaatattttggagctcctccaattaagaggtaaagtctatttttcacctttggaatctggggtagcttttttacttccttcaaccaagaaatgtagcagcaatggaagcagtcctatacttcgcttcaagacactttgctgagtctgcctttgtgctctgtgagctaccatgtgaagaagaccaaactagccccatggagaggcctcatggaagagagcagcccttgctggccagccaactgactacaaacag[223 bp omitted]gaggcgggagaatcgcttgaacccgggaggcggaggttgcagtgagccgagattgcaccattacgctccagcctgggtgacaaaagcaaagatctgtctcaaaaaaaaaaaaaaaaaagaagaagaagagcagtgagcagcgccgtccctgctgggctcagcccccagccaaccctccagctaaatgcagccatgtcagtgaacccatacaagcccagcagaagagctttccagccaacccgcagaatcatgagataaatcattgttgttttaatccatttacttccagagtgatttgttacccaagaatagacaactatgccccaacaatctaactcatatcccagaaaaatgtgcacatatgtagtacatcaggaacatgcataagaatgtttgcagcaacattgttttaatagcataaaactggaaagactccaaatgttatcaatagttgaatggatttttaaaaactgtggtatattcatatactgaaaca[134 bp omitted]cctgtctctgctaaaaatacaaaaaattagccaggcatggtcgtgggcacctgtaatcccagctacttgggaggctgaggcaagagaatggtgtgaacccaggaggcagaggttgcagtgagccgagatcacaccactgcactccagcctgggcaacagagcgagagtctgtctcaaaaaaaaaaagaaaaagaaagagcacagattaaagttatacacaatatggataaatattgcaaacatgttggatgagaaaaagaaagcacaaaagtaagcaaagagaatgtatatatgagggaacaaataactaaacatattgctttatataagtggacaaattatattgcttagctatgcatacatagatgatagaatataaagaaaaacattaatcactatccttagttctttgttttttttttttcttttttttttttttgagagagagtctcactctgttgcccaggtggaatgcagtggcacaatctcagctcactgcagcctccacctcccaggttcaagcaattctcctgctttggcctcctgagtagctgggactacaggtgtgtgccaccacgcccggctaatttttgtatttgttagtagagatggggtttcaccatattggccaggctggtctcaaactcctgacctcgtgatccatctgcctcagcctcccaaagtgctgggattataggcatgagccaccgcacccggcttgtttttctttacatttgatcatctatgtatgcgtatctactaagcaatatagtaaccactatcctgacttttatgatggttacctctgggaggcagtaaagagattatgattagaaaaagatacacagagagcatctagggttattctagttcttaatacaggtgatgtttacttcacggttcgttacacagtgcattgttttatacactttttttttttttttgttagaggaagggtctcgcccagctgatttcaaactcctgggttcaagcaatcctcccacctcagcctccctaagagctggcattacaggcgtgagccactgctcccggccttgttttatgcatttttccatatgtaggtaatagctcataataaaaggtttttttgaaaatacacaaaaaaactaccattacactcccaccagactggaaacaatttaaaagtccaaccaagtttaatcaagtgttgtgcaaaaagtagaacaaatggaagtctcacacatccctgatgggagggcaatgcattacgccactttgaaaaccagacaatatatgataaaattgaaggggagcacaccctactcagcaattcctttcctaactatatgctgtcaagaactcttgcacacgcacacatgtatattcccaggcatcttctagaagaaaatggtggttatttgtgagggttagggttactaggagaggtcgggcgcggtggctcacgcctgtaatcccagctctttgggaggcagaggcaggaggatggcttgagcccaggagttcaagacctgcctgagcaatatagtgggaccctgttctcaaaaatttaaattaaaaaaaaaaaatctgctgggagagagaggaagaggaggaggaagcaaaaaaaaagaaaaagaaaaaaaagaaaaagaaaaaaaaaagattactgggagaaattcaactcagggttgcctcctctggaaggccccatctgactagtccagacagaattaatggctctgtctcctgtcctcacccatcacttcagttaccagttagcacaagtttttggctgtctcattctcctttccttccccctccaaaattgaaaacttaatgaaacaaggactgtggtctgattcacctgtccaagtctctgttgtatagaaagaacacttcctaaatgtctgtctgatggatgtttttggaattaatgcctaaaaataagaaaaataagaaacaggggtgatcagacaatcaaggttctagtacagagaatccttttggagtttctgctagattgacagaaatccccaattcaggagttaacagttaagaatgggggccttagggcgcggtggctcacgcctgtaatcgcagcactttgggaggctgaggcgggcggattatgaggtcgggagatcgagaccatcctggctaacatggtgaaaccctgtctttactaaaaatacaaaaaaattagccgggcctggtgatgggcacctgtagtcccagctactcaggaggctgaggcaggagaatggcttgaacccaggaggcagagcttgcagtgagccaagttcgcgccactgcactccagcctgggtgaaagagcgagactccatctcaaaaaataaaaataaaataaaataatgggggccttctacttctccatttttccaaggatggccttggaagtctctgtgtggtatggtcttggatggtattttgttgtgtatctgggattagagaagccttcaatgtttgcaatttttagtacatccctgttagcatatccactctgaggtggatagctggcaatctctgagtttgaagatttatttctagggtgacaaaaggctctgagaaggataatatatgataggagattctattgtctccatttttagctatggggaaggtagagggcttgcaagtgcacccaaggttgaaatgtgtgaacatgggtctttgcagcacctttaaggttagggtctcagggttttaaagttccctggagctgagacccttaacaaaggggccggccttacctctcacagcagcgatgtgtgatgactgtcgcccagaagcccaggacacagaagttgaaagatgtgaaaaccaacaaagtgagcaggtttatcacagacacgagaaaggcatcactgagacagttgttggactggggcatgtaggaggctaaggaggcaacggagccaaggcctatgcctgtgttagacaaaacttgaccccctgctagagaccacacactcatattgtacacatccgatatctaaaagagagaagacaagcataagggggttgtaaaagaagaagcagaggacaactataatagaaatgttgcagggaggagagagggagatacaaaagtaaagaatggggaaaggaagctctaagaataggcagctgtggtgccctacaaggcctgacgggggagtgaggagatagatttcaccttggcaaccaccaactgttgaaggccaaattttgccccttccaggagtagagtccggatgaagaaaccgacaatgatgaaacaggggagcagtaccaagacatagattacctgaatcgagagtgggacatatcagcaaccgtgtaccagtaggggtcaaccaacagttaggagggatcaaaagttctgagtcagaaatgagtaggagttagaagaaagccttcagcaagagtcaggggctaggggagtaaaagccaaaggagtaagagattaggagatcaacaagtaacaaattgaggtaagggctaaagcatctgagaatttcaaggaatccaatactggtggctcaccttcccagtggacttgagcccattgatcatgaaagcaccaacaagacaccagcaaagaaagaagggcaggaccagactgtagactggtgacccgccatcctcgattctgtctgaggccttcaaggcctgctggtaccagaagtatatggagggtgttgtccgttcacattcaggatctggggggacctggctttagacatgcctgctagacaaggtaccccctcttcttccttatcccctcccccacctcccttttctctttccctctcccatttctttttccttcttcttcctcttccttgtccctccccactctctcctattccaaattcccttctacttctacttctccatttttcccttctcctcttctttcacttcctcctcaccaaagccactagagttcatcgttaagggacatttctcccatggaacgggaaactggaaggactggctcatgtagaagatgatccaggaattgaccacattgaagtacaggccgaggatgaagcacacctgggggccaaggaggatatggctggggaggaagagcagggacaggaaaagggaggggatttgacagaggattggggaaccaaagggatctgacccatggaggtattcacagggcgcatttcaggaggagggttgggatggcggtggggtgtaaaagtcaggcctgggcagccatgggctcctcaccatgaagctagaataccccacaccaccaatccagggggcaatgatcttccatacacccatgccaccctgacgcatgctctgaccagctgccatctccaggaagagaagaggaaccccgaccaggaacagcatgaagatgtagatggcagcgaaactgcctgtgaagaagattcagaagggactctgagaaccatgtggcctttcagtgcctggactccaggagcccaggaaaacattctccctaccagcgacctcttccagggccacaggcatcagggctcacccatgtctacatccctcacggtcccaagtgtccagtcctctggcccccaaatcctggaagacccaagtacctagtttccagcccatcttgggcccaggcctccagctttgccatccccatgttcagataccctgaacctctcatgatcctaagtgtccagggacctggctcctatcctgctcagagcaccaggtctttagtctctacatatctcagaaacattcatggttaaagcctggacaggactctgtcctgattgccccttgtggacccaggtttcctggtccccagacttacagcctccactgttaagccacaggtaggcaaagcgccagagacaagatggcttcatagagaagcccacctgagccagaatatactcagttttgctggaccagaacggacgggcaaggaggacctcactctctttcttctctgtcatctgcaccttctcatgcgtgggtttctggttcagggctgaggcagttaacgcctccaatacagaaatttgcttgggctgactggtcctggcctgagcctctgcaacccgggctgctgaaacttgggcctctgaggtccaagatgttgcagaccgggtcaatgaacccttgtcttcccacgtttgacttcctgggacactgtcagaaatcactgtgccagtccatgaggtgtttgccagcaaggatgtcgaaggctgggcctctgtcttcatctcacacagactctctggggcagctcccgcttctgcaagggagggttcatcttcctgaggagacctgaaggacaccaaaatctgtagattttagattttagagtcaagtaactactgagttacaaaacaatcctcaacatctccttaaagcaaattttataccaccactgacatttaaagcacaaaaaaatctcttgcataagtttcacttcttagaaatgttttcacgtggtggctcacgctgtaatcccagcactttgggaggccg[134 bp omitted]gaggcaggagaatcgcttgaacccaggaggcgtaggttgcagtgagccgagatcaggccactgcactccagcttgggagacagagtaaggctccatctcaaaaaaaaaagaaaaaaaaaaaagaaatgttttcttgtacaggatagggatagagacagacatacccaagagtcaggaatccctgaaatcaaaggatttcttttttttttttccagctactgggttcaagcgattctcctgactcagcctcccaagtagctgggattacaggcgcccactaccacacctgactaatttttgtatttttagtagagccaggttggtcttgaactcctgacctcaagtgatccgcccacctcagcctcccaaagtgctggaattacaggtgtgagccactgcacccagcctgaaataaaaggatttctaagaacactgaagtactatttacagagggcttctgaatttaaaaacaaaactaaactaaactaaactaatttaatactaaatctgccttgtaaccttagaaaagttactttacctttctgagctttctaatctgtaaaacactcagatctctgctcaaatatagcctcaccagagatgccttccctgtccacctatctaaaatagcagctacctacccacaactctctttacttcatggcatttctcatctcctgactttattatctattgattgttaatttattcattgtccatctctgcctactgctctatctccagcaaaaggatggtgttctacctcacatctagggctattctcctccttattctccaagttcccgccactctgaacttctgttggctcttcaaatacaagagaaaaggcaaggagtgtgctgaaaaaaaaaaagttacatgaaagagaggaagagagaggggaaactggagttttctttcagtgggggaaggagcatgctttccaaaagcagaggcagtagatgggcttcaaggcagcactggcacatttgggtgacatggataactgcttgtgagacacagcttccaaagagctctttgttacacaagaaaatgcttataattcaattacaggttaaaaacataagactaagatacaaatttctatctttagttctatctctactacatttaaaaatgcaatgaaaggctgaaaggaaatacatcaatatacagaagatgatcaggccaggcgcagtggctcacgcctgtaatctgagctactcaggaggctgaggcaggaggatcgtttgaacacaggaggcggaggttgcaatgagccgagatcgcacgactgcactccagcctgggcaaccctgtctcaaaaaaaaaaaaaaaaaaaaaaagacgatgatggctacaaatatgtttatatccttatccctgcttttacattaaattttttaaaatcttgtattacttttttttcagacacaggttctcactctgtcacccaggctggaatgcagtggcatgatccacagttcactgcagccttgaactcctgggttcaaaggatcctctcaccttatcctccaaagtacctaggactataggcatgtgccaccatactcagctaatttttaaaagtttttttcaagatgggagtctcactatgatgctcaggctggcctcgaactcctgtgctcaagtgagtctccggtctcagcctccagagtaggtggcattacaggcacaagccaccattccccactcacctgtattactttaataatcaataaaaatacggccaggcatggtgattcatgcctgtaatcccagtactttgggaggccaaggcaggcggatcacttgaggtcaggagtttgagaccagcctggccaacatggcaaaaccctatctctactaaaaatgcaaaaaaaaaaaaaaaaaaaaaatagccggacatggtggcaggcacctgtaatcctagttactagggaggctgacttaggagaatcacttgaatcgggaggcagaggttacagtaagccaagatcataccactgtactccagcctaggtgacagagtaagactctgtctcaaaaaaataataataatcagccgggcacagtggc[131 bp omitted]gtggcgggcgcctgtagtcccagctactcaggaggctgaagcaggagaatggcgtgaacctgggaagcggagtttgcagtgagctgagatcacgccactacactccagcctgggcaacagagtgagactccgtctcaaaaaaaaaaaaatcataatcataatcataatcataatcaagaaaaaatatgtattgataagtgaaaataaaaagatcataatggacaaagaaatccaattgaagaagctctcatcagcgaaatctggacaaatcagaacatcaaaataaagaatagtaacagatgagaaccaacagactaaaacaagaatccatgaatccacagggatacaactcaggaaaaggaaaacctcttccttatagtagaatacaaactaataaatgtacaaggaacgatgaattagaaggtcactgcttatcataaactaatcaagttgtacacatgaaatatgtacagttttttacttgtcaatcatccctcaataaatatgtctttttaacaaatcattgtttggaaattaccagagtaataactgacacaagcaagaatcatcaatggttgctaaaacaagatgatgaaaatttgatggggacaggataattgcatagtattactgtatctccccacaagatattccccccaaaaaaacccaagaaactagtatctttagagtattacacactacctaaaccaataatagtcacctgatatcatataactcctgatacaatgcattaagagcacaacatcatttctgtgggattcctgccaaaaacatgtaacaaaactccaatcgtgaggaaacaccagaaaacaaatctaaattgaagtacattctgtaaaatagctggcctgtgctcagtaaaaatgtcacagtcaataaagacaaggaaagatggaagtgttgtaagtctgaaattatgtcaaaattttgttaaattttttaaacttccaagcacctgccactcctacaattcaccatcaaaacaaaaggaagtttcttctaagatagccacatgaacaccaatctccaaacttacccacaatctccccctacccaacaaaaaaaaaaaccaatgattttaaaatattacaaatatggggatatctgcatcatttctgaaaaataggttccatcctcatgtcaaaaacagagaaacttctgctacataaacaagaaacaggaccaaactgtaatcactgaggagtcagttcacatctctttttcctgatgaagtggttcagtgtttcaggaagtaagtaaatactttcccagcaacttgtgggaaataaaaacaatcacttgccaaagaccttctgctccagtgaaccaacagcttccagaagctgtatgccagagaatgcaacagcaggtgggccactcctctgttattggatttattggagttattggtgggttgatgggcgtctccctgagacaaatgatgcttccataacattaagagagaagcagaaaatcatgcagggaagaaaaggctgaagaaaaaattaggtacaaaaatccagcctttggggctggtcatggtggctcatgcctgtaatcccagccctttgggaggctgaggcaggagatgttttatgtaagcttcgtggtaactacaaagcaaaaaactcagtagagatgattcaaagcataccactagagaaaatcaatataattagtcacattgatataataaagaagaaaaatattatcatctcaagagatataggaaaaacatacaatacaatgatgatttacggagaaaaacttttagcaaaccaggaataatttccctaacctgataaatggtgtctctcaaaaaaaaaagattatacttaatagtgaacatatgcttaaacataggcacatatttaataatgaagtgaagaaagcttgccttttgaaatcaagaacaatcaatgaaaccagctatcagcacttccttcccattgcattaaatattttagacaacacaggaaagcaaggggaataaaagacaaagattaaacaaaactcactattcacagatgatatatctatgtggaagatccagaatactacagataaattatttaaattaataagataatttagcaagattgttggatgcaaacagcaataaatgaaaattatttatatgtctatgcttgcaatacataattagaaaataaaattttaaaataataatgccacttataaaataattttttaaatatagagtaaaatcctgggaaggtaatggcaataacagcaacattgttttaaaatcttcccaaatactcacatgaaaacaagtagttctactagattgcaagcccaaaatccatggataatatttacaatatcaagataaaccccaaaagacaagtctatgagaacaaaccacaagagccacagacctgtatagaatcagcatctgtgtgggaggaaacaaaggaagcaagagagcatctgacagacctggggatgggggacagggaaaccagtctctcaaaataatcaacaggtactcaccagaaatcatgggaaggctattagagaacagcagctaaaactagaagatgtcttgcctaatccaataacagttgagtgcatggagtcaacaatagaaactgaagggaccagggcagactagattctatgaactcttaaaattaaccaaccagggatcttttccaacccagaggccacaatgaggagaaattcctgtgagtaaagccaaattgagcaatacaagaacaagaatgatgaaggataggccagacacagtggctcatgcctgtaatcctagtactttgggaggccaaggcaggaggatcacttgaggccaggaattcaagataagccttgacaatgcagtgaaaacccatctctaccaaaaaaaaaaaaaaaaaattaaaattaaaattagccaggcatagtgggacacgccagtggtcccagctatttgggaggctaagtggagaggatcgcttgagcccaggagttcaaggttgcagtgggctatgatcacaccactgaactccagcctgagcaacagagtgggacctcattctctaaaaaaataaaataaaataggccaggtgcagtggttcatgcccgtaatcccagcactttgagaagccaaggcaggaggatcacttgaagtcaggagtttaagacaagcctggccaatatggtgaaaccccatctctaccaaaaaatacaaaaattagccaggcatggtgggacacacctgtagccccagctactcggaaggctgaggtgagataattacttgaatccaggagggggaggttgcagtgagccaagattgcaccactgcactccagcttgggcaacagagtaagaccctatctcaaaaataataacaataataataaaataaaattaattaattaaaagataattttaagaaaacatagaaatgaaggatatacaggatccagataaaaatggggagaagaaatttccacttttgaccatgaaagcaaaacagtgtctggagttacctccacaaaaacactacaaaactgtacaaataggccaggcgccgtggctcacgcctgtaatcctagcactttaggaggccgaggcgggcggaccacgaggtcaggagatcaagaccatcctggctaacatggtgaaaccccatctctactaaaaatacaaaaaattagccgggcatggtggcgggcgcctgtagtcccagctactcgggaggctgtggcaggagaatggcgtgaacccaggaggtggggcttgcagtgagcagagatcgcaccactgcactccagccagggcaacacagcgagactccgtctcaaaaaaaaaaaactgtacaaataattaaaacaactattttcacatattaaacaaaggcagtacagcattgcaatctctaaaaaaaggccagaaaacaaggtaactaattgcacgattgccccatttttctgctaatttccaaactttggcacaggaggaagaatacaaacagagcctggcagtctcagcacttgaggaggcaaaagtcagttcaggaaggcttaggtgactagaattagctgggctaagtactcaacagaagggagccacagagaaagagctctaggaatctggataaagtaccttcgagccattagctaaatatcaacctgcacatgtatagtatgaaacctcataagaacaggcaaagaataaattccaaggaaagaaaagtactggggaactacaggtaaaacaattcctagaacttggagaagaacaagaattactcaagtttccatcagccagtgtggagagactttactgaatacttggaacatttaaagtggcataaactagctctagttctagtagtaggactactttagacctgaaaaaaaaaaattcttaaaagcaacccttaaacagccaaaactgatcttcaagtaacttaactgcctgtcacaacaaaggccaacattccttaagataatacagacaaacctagcactgaacaacaaaaaattcataatgtcaaccatctagtcaaaaattactagacatgcaaaaaagcaggaaaagtgacccataatcagacaacaaaaacagaaatgatagactaatggaattaacacaccataacactaaaatagctgttacaaatatgcttaatatggtcaaggacttaaaaggaaaacatgaacagaatgaggaatataagatagctagatagctagctagctagacagacagatagatattttctcttttgagacagagtctcactctgttgcccacactgatctcagctcactgcagcctctgcctccaagtttcaagcaattctccttcctcagcctcccaagtagctggaattacaggtgtgcaccaccacaactggctattttttttttttttttttttttttagtagagacagggttttgccatgttggccaggctggtctcgaactcctgatctcatgtgatccagctaccatggcctcccaaagtgctgggattacaggcatgagcctccatgcctagccatgatatattttaaacatcaaatagaacttctagagatgatacaacacctgaaatgaaaatttcactgaagattactggcagattttaataaatcagtgaacttaaagatatagcaatagaaacaatccaaaatgaagcacaaagaaaaaaaaaagactgaaaacaattaccagagcattagtgactgtgagacaatatcaaatggcctaaaatgtgtaactggaggtccaaaataaagggaggatgggaaaatgaaaccaggccaattttccaacaagccagatgcccatagaactgaagcttgagaaacttacatttgtacaatgagatgaacctgctgtatgttgaccaagtactcttctttactcctccctaattccttcatatatgtgtgtgtgtatatatatatatttgtatatacatataaatacatatacatatacatatgtgtatatgtgtatatgtatatacatatacttatacatatatgtgtatatgtgtatatgtatatacatatacctatacgatatatacatatacatatatatatcaagaaaagactcacataattgaaaggataaaaggacagttctacaataataactggagactttaataccccactacgaacaatggacagaagcagcagacagaagataagcaaggaaatagaggacttaacacaataaaccaaccagatctaacagatgtattcagaacactctagccaacagcagcagaatacacattcttctcaagtgcacatgggacattttccaggagagaccacaaatttgtaggccacaaatttcctttttttctcaatagaattagaatgataaatatcatacaaaatatcttctccagccacaataggatgaagttagaaatgaatcacaaaagtaaaattgaaaattttacaaatttgtagaaattaaacaacacactcttaaacaaccaatggatcaaagaataaactacaaggggagttagaaaatacttacagataaatgaaaacgaaaacacacatactaaaatttatgggaggcaacaaaagcaatgccaagggggaaa[136 bp omitted]catagtgaaaccccatctctattaaaatacaaaaattagctaggcatggtggtgggcgcctgtaatcccagctactcaggaggctgaggcaggagaatcgcttgaacctaggaggcggaggttgcagtgagccgagatcacaccactgcactccagcctgggcaacagagcaagactccctctaaaaacaaacaaacaaacaaacaaaaaaaaaccagatcttgaatcaataacctaactctaaaacttaagaaactagaaaagcaaactaaacccaaagctagcagaagaaaataataaaaattaaagcagaaatgaatagagaatagaaaaacaatagagaagccaaaagttgtttctttaaaaatatcaacaaaattgacaaacctttaactagatgtactaagaaaaaaagagaagactcaaatgattaaaaccagaaatgaaaatggggacattattaccaattctacagaaatagaaggattataagagagtactatgaacttatgaacaactgtacaccaataaactggataacctagattaaatggacaaattcctagaaatacaaatctactaagactaaatcacaaacagaaaatctgaatagatctataactagtaaggagattgaattggtaatcaaaaatctctcaacaaagaaaagctctggacctgatggcttcatgggtgaattctactaaacctttaatgaattaatatcaatccttctcaaacttttccaaaaaattggagaggagggaacacttcctcattcatcctataaggccaacattgccctaataccagagccatacaaagacattataagaaaagaacactacagacctatattcattatgaactttgatgcaaaaatcctcaaaaaaaatactaccaaacctaattcagcagcatattaaaaggattatataccatgaccaagtgggatttattcctggaatgcaaggatggttctgcatacaaaaatcaatcaatataatataccacattaacaaaatgaaagaaaaataatgattctctcaactgatgcagaaaaaacatttgacaaaactcaataccctttcatgataaaaaaaaaaaaaaaaactcaacaatctaggagttaaaggaaaatacggctgggcatggtgactcatgcctgtaatcccaacactttgggaggcctgatgaccacttgaacccaggagttcaagaccagcctggggccaggtgcagtggctcacatctgtaatcccagcactttgggaggccaaggcgggtggatcacctgaggtcaggagttcaagaccagcctggctaacatggtgaaacctgatctctactaaaaatacaaaaattagtcagatgtggtggtgtgcacctgtagtcccagctacttgggaggctaaggctggagaatcgcttgaacctgggaggcagaggttgcagtgagccaagatcataccactgcactccagcctgggtgacagagcaagactccatctcaaaaacaaacaaacaaacaaacaaacaaaatttttaattacctgggtgtgttgatgtacttctgtagtcctagctactcatgaggctgagatgggagaatcacttcagcccaggaggtcaacgctacagtgagccatgatgacaccactacactccagcctgggtcacaaagtgacaccatgtctcagcaaaaaaaaaaaaaggaaaatatcccaacataatagccatatacgaaaaactcacagcaaatgtcatacttaatgataaaagactgtaagcttttcctctaagattagaaacaagcgtagaatgtctaattttgccacttttattcaacatagtactggaagtcctagccagagaaattaggcaaaaatataaataaataaaaggaaaccaaactagaaagattatatgatcttatacgtagaaaatcctaaaattttcaccaaaaaaatttttgagctaataaatgaattcagcaaagtagcaggatacaaagtcaacaatcaaaactcagttgcatttttatacactaacaatgaacaatctgaaaagaaaattatgaaaacaattccatttgtaatagcatcagaaagaataaaatacttaagaattaacttggctgggcacggtggctcaagcctgtaatcccagcactttgggaggccaaagtgggcagatcacctgaggtcaggagttcgagaccagcctgacgaacatggagaaaacccgtttccattaccaagttacccaggcatggtggcacatgcctgtaatcccagctactcaggaggctgaggcaggagaatcacttgaacctgggaggcagaggttgcagtgagccgagattgcaccattgcactccaacctgggcaacaagagtgaaactccatctcaaaaaaaaaaaaaaaaagaattaaccaagaaggtgaaagacatgtacaaagaaaactacaaaacattgctgaaaaaaattaaaggagacataaataaatggaaaaatatcccatgttcatgggttggaagacaacactgttaagatgtcagtattacccaaagcaatctacagaattagtagctttttttttttttttttttttttttttttttttttttttttttttgcagaaatagaaaaacacgtcctaaaactaacatgaaatctcaagggaccctgaacagccaaaataatcttgaaaaagaagaaaaacgctggtgtactcacatttcctgatttcaaaacatattacaaagctatagtaatcaaaatagtgtgttactcacataaagatacagaccaagggaacagaatagagggcccagaaacaatgtatggaaaaatgattttttacaagggtgccaagactactcaatgagtaaaggacagtcttttcaacaaatggtgctgggaaaactggattatgtacaggcaaaagagtaaagatggactcttacctaacaccacatacaaatacacaaaataaatcaaagacctaaatgtaacacttaaaattataaaattcttagaataaaacatacgacaaaagcttcatgatagtggatctgcaatgaattcttggatatgataccaaaggcaaaagcaacaaaagaagaaacaaacaggatttcattaaaatgttttaaatttgtgcatcaagagacactatcaaaggggtgaaaagataacccacagaatgggaggaaatatctgaaaatcatatgtataataagagattaatattcagaatatatagagaactcgtaaaactcaacaacaaagaaacaaacaacacaattcaaaaatgggcaaaagacttaaatagacatttctccaaggaagatataccaatctccaagaagtacatgaaaagatgttcaacgtcactaatcattaaggaaatgcaaatgaaaactacaatgagataatacctcgcatccattaggatggctaatataaaaaggcagaaaataagaagtgttggtgaggatgtggagaaattggaatccttgtgccttgctggtcagaatgtaaaatggtgcaaccaccatggaaaacactatggtggttcctcaaaaacttaaaaatagaattaccatatgatccagcaattccacttctgggtatacacccaaaataagtgaaaaccaagcctccagtggctcagcctgtaatcccagctctttgaaaggctgaggtggaaggattgcttgagcccagaagttcgaggctgtagtgagaggtgatcatgccactggactccagcctgggagacagagagagaccctgtctcttaaaaataataataataggctgggcacgggggttcacacctgtaatctcagcactttaggaagctgaggcgggtggatcggctgaggtcaggagctcgagaccagccaggccaacacagtgaaaccccgtttctactaaaaatacaaaaaattagctgggggtggtggcgcacgcctatagtcccagctacttgggaggctgaggcaggagaatcgcttgaacctgggaagcagaggttgcagtgagctgagatcgtgccactgcactccagcctgggtgacagagtgggactccatctcaaataaataaataaataaaaaataatagattcatgtttcttaaacacattctagaacagttgtccttaaaagcaagctttacggaagggagagaactgagttttggccagctggccacttccaacatccataaagccccttgagccccaggcggactcctcttcccatatgggtgcaaccctccatggtgcccctacaccgtcatcccaagcaactcctaggctcatgccctgtggggagtgctcaggatcccccagaaatgcccattcccctcacattacctccttccctggaactataacctccagaaaaggaaaataaggagctggtgtcccatttctgcaaaaagcagaaaataactgccctaacagaccagtgatggggctagacccgggtttctgccactcgggcacttgacactgatggctttccccaaaggcagggactgatggccgaatcctgtcaaggaattggctcaaactcggactggatgagtgaggagagccgaagacagtttcctctgtcctacgtggggggtaaaggagggacccctttgatccctcagctccacagagcccagggcaaccaggaggctcccagccagtcacctgtcacccgtcagtggagcccagtgggcccgggcctcgaaaatggcgcccagccccacacaccccagatgtgggaacattttagggctccctgggccgtgaccctcaccctagccccaaggcttctgccaggttcttcagtccagccagtcggacaaaaatgagggtgaagaagccccagctgagaagcctagcaatctcctcaggccccttcaggcgtcgacagatcggtttgggcgacacccctcgatctgcctggcgcgcggcctttcccgccgattctctgcgcatgcgccgccgcgccccctcactctttccctacagctgtagcaaacactgtaaccacttcgccctccccaactccctgctctctccccacacgcacgcacgtgtgcacatcctctgactgctcacgcgccactcccttccccaccgcaccccaccccgacacccacgatgccacgcttcaggcggggctctaagacaaggcctttctctggcacatgcactttgcttccacttcatgtaaggaagaagagggtaggaagtgggagaatcgtctcattcattccttctagccttcaaacctttcgcatttacttaaagatcgcctactagaaaccaaaccttaaatatgcgtccaacaaggcagacagggacgttgccttaagagagctcagaagcctactagggctgcagacaagaattaaaaactcaaagatttacttaggtcatccgttctcatactttccggtctcttaagaattattaaggactccaataatttatgagttacatttatatgggttgtatgtttatgtgagttgtatctatcaatattaaaataaatttctaaaatagtcattgtttaaaaattcattatgtgtcaaaataacatttttatttaaaataactataatttctactccaaaagaaattttggcgctgggcgcggtggctgacgcctgtaatcccagcactttgggaggccaaggcgggtggatcacgaggtcaggagttcgagactagcttggccaacatgatgaaaccccgtctctactaaaagtcaaaaaaaaaaaaaattagccgggcgtggtggcacacacctgtaatcccagctactcgggagcctgaggcaggagaatcgttggaacccaggaggcagaggttgcaatgagccgagattttgccactgcactccagcctagacaacagagcaagactccgtctcaaaaaaaaaaaggaaaaaaaagaaaaaatttggggagaagaatggcatcattttacatttttgcaaatctctctaatgtctggcttcatagaagacagctggattctcatatctgcttctgcactgagtgtgtcaaaatagctcatgtcttgtagcttctggcaaacatcactatattcaaagaggaaatgaaagtgaaaggcaaataatatcttagtagtattatgaaaataatgttcacctcatggacccccaaaagtgtttcaagagcccccaggagtccctgagccacactttgagaatgaaaggcttaaattgttatgattgaacaaagagatgaagaggaaattttgggggtgctgtaagaattcatcacaatctttgggaatcattcaatctttcaacacgtatttatcgagagtctactaaatgctaggaactgggaatagtgtagagaacaaaacagaccccattcctgccctcgttttgcttcacacaacaagaaaacagatatatgatgaatctca[138 bp omitted]atggtgaaaccccatctctactaaaaatacaaaaacgagccaggtgtggtggtgcacgcctgtaatcccagctactcgggtggctgaggcacaagaatcacttaaaaccatgaggcagaagttgcagtaagccaagatcacactactacactccagcctgggtgatggggtaagaccctgtctcaaggaaaaaaaaaaaagtgctgcgacagaaaagggccacagacctatttatttctatcgaattttttttttttttgagacaatctcactttgtcacccaggctgaagtgcagtggcataatctcggctcactgcaacctctgcctcccgggttcaagcaattctccctgcctcagccttccgagtagctggggttgcaggtgcctgccattacgcctggttaattttcatatttttagtagagtcagggtttagtagagtcagcctgccatg[136 bp omitted]aacactggagttgaggcttaaaggattatttgctaggtgaaaaatgtgtgtgaacatctcaagccttgaggctgtgcaaaggccctgaggcagggcaaactgtgtgttcaaggcaccaggaaaagtctcagtcggtcaataaatatttattgaatgatgtgccccacactgtcctagacccctgggatatagttatgaaaaagattttacgttccagttgcacaaagaaagtaaatgcctaaatagaaagaatttcagagagtaagagtgctgatagggagttactttagacagggtagtcaagaaggactcttggggaaagtgatatttcagcagagagctgaaggaagggagccttgtgaacagcatagggaagaacattccaggcaaagaaaatggcaacagcaaaagccttgaggcaagaagtacacttgatgggttctggaaatggcaaagagtctgatatgaatggatcccagtgattgaggaaagggtagcaacagatcagatcagagcagtggcaggggccagagtattatttggaggcccttataggtcatggtcggaatttttttcttttttttctgggtgagatgaaagctatttgagggttctgagtcaaggagtgactttcattttaatggcaggctccccctggcttctgggcagagaatagcatgtatgggtgtattcctctgttttcacactgctgtaaagaactgctcaagactgggtaatttacgaagaaaagaggtttaattgactcacagttcagcttggctggggaggcctcaggaaacttacaatcatggcagaaggcaaaggggaaaaaaggcaccttcttcacaagcaaaggagggaagagccccttataaaaccatcagatctcatgagaactcactcactatcacaaaaacagcctggggaaaccacccccatgattcagttacctccacctggtctctcctttgacacatggggattatgaagattataattcaagatgagattttgggtggggacacagccaaatcatagcaatgggctaaagatagaagcagagagcccagtgaggaggaaatctctagtccaggcaagtgatggtgttgattagatctgggtaatagcaatggagatggtgaaaagtggtcaaattctggatctatttcaagaatagagccgacatgatgtgttgatggattgtgtggtggttttaaaatacgtctgcaaattcttcaacactttgaaagataaagtctatttccccaatctttgagtgcaggctctccttagcaactggcttccaatgaacataagtaatggtggggaacttcaggactaggtcataaaaagcattgctgtttcttacttgcccattcccttcaactgatttctgtaaaggaagccagtcaccatacggtgaggacactcaagcaatctgtgaagagatccatataagagaagagctgaaatttcctgccagcaaccagcaccaggtgagtgaaccatggtgaagtggatcctccagccgtagttaaatctccagatgactacagccccagccaacatcttgactgcaacctcataaaacactgtgagcagaaatcatccaactaagctgctcccagattcctgacccacaaaaactacagtaggtaagaaatgtttattgtgttttttttttgagatagagtcctgctctgttgcccaggctgcagtgcagtggtgcgatctcagctcaccacaacctccgcctcccaggttcaagcaattctcctg[132 bp omitted]cagcctcccaaagtgctgggattacagtgagccaccgctcctggcctaagaaatgtttattgttttaaactgctaaatttggggtaatttgttacagagcattagaaaactaatggtgattaggtttggggtctgagagaaagagaggaatcaagaatgactcagccgggagcggtggcttgcacctgtagtcccagcactttgcaagggcgaggtgggaggattgcttgaggct[170 bp omitted]ctgcctcagcctcccgaatagctgggactacaggcgcccgccactacgcctggctaattttttgtatttttagtagagacgggg[147 bp omitted]ccaggtgtggtggcacgcatctgttgtcccagctactcaggaggctgagtgggaagatcacttgagcccaggagattgaggctgcaatgagtcatgatcgtgccagtgccctcccacttgtgtgacagagcaagacctcaaaaaaaaaaaaaagactccaaaactttgggcctgaagaattggaagatggagtgacaatttactgaaaaggaaagtactggagtgtgcaggaggtgggagggaatcaatagtttcgttttgggcgtgttaagtttgagatgtcaattatacagccaaaggcagaggttaagttgtccttcactgcaaggagacctgggaaatgaatcttcctgagtccgcagttcaggggaaagtttgaggctaggcatataaattggtaagtcaacagtattgtagattgcgatgaacactatggcactgcatgatatcatctcgtgagtgagtgtagctagaaagggctaggactccccaaattttagaagctagaaaaaggacgatccaatgaagattgaggagaaccagccagtgaagaaggaaggaggaaaagcaagagggaatttgccagtaaaggaggaggggatcaggtgaattcaatgggtagaattgctgttctcaaacgttagtgcacatcagtcaccaggaaggcttgttaaaacacagactgccaggccaggtgcagtggcttgcctgtaatcccaggactttgggaggccaaggtgggcagatcacctgaggtcaggagttcaagaccagcctggccaacatggtgaaaccctgtctctactaaaaatacaaaaattagctgggcatgatggtgggtgtctgtaatcccagctactcaggaggctgaggcgggagaatcgcttgaacccgggaagcagaggttgcagtgagccgaggttgtgccattgcactccagcctgggcaatagagtgagacaaaaaaaaaacacaaaaaaaaaaacagattgccaggcccgcccccagagtttctgattgagcaggtatattcgcttcccgagactgctgtataaattactacaaacttggtggcttaaagcaacaaaaatatattatctcacagttctggatgccaaaagtccgaaattaaggtgtcagcacgccacttccttcaaaggctcagaggacaatccttccttgactcttcagtttctggtagctcctggtgttccacttttttttcccctgtagggtcttgctctgtcatccaggctggagtgcagtggtgcaatcacggctcactgcaacttcgatctcccaggctcaagcagtcctcccacctcagcctcctgagtagctgggactgtaggtacataccacaaagcccagctaatttttttgttaatttttgtagacagggtctcactatgttgcccaggctggtctcgaactcctgggctcatgtgatcctcctgcctcagcctcccaaagtgctggaattacaggcatgagccacctcacctggcccataataatgttttgatatatatagtgtatgcagtaacaggtattctatttgtagttgttaggatgtttaaggttagctgatttaacaaacaaccgtaaaatcttagtagcttaatacaacaggttgttacttacataaagtccaaaatgctttatgtaagtccaaggataattctcagcttcctgcagccagtgagtgaagggagaaagagtaaggattatggaggacatttcaggctgagtctagaaatgggctgtgtcccttctgcacccattccattggcccaagaccagtcacatggcctcaacttcactgcaaggagacctgggaaatgaagtcctcctgtgtgcctaggaaagaagaaaccaagttggtgagcatcaaagctgcagtgagccgtgattgcaccactgcactctgccacctacccttcgacttctggttaatcatgtactcatctctgaggagggatcagtgggtgggaaggagggattggtgtattagtctcctatggctgaaatagcaaattaccacagacttactacttagaacaacagaaatgtattctcacatggttctgtaggccagaagtccaaaatcaaggtgtcaccagggccacactccctccagaggctctgagagaaaatcagttctttgcatcttccatctcctggtggctccaggagttccttggcttgtggctgtagaactccaatttctgtgtctaccatcacatggtgctctcctcttctgtgtcttctcctctgtgtgtttcttagaaggacacttgtcagccgggtgcggtggctcacgcctgtaatcccagaactttgggaagctgaagtgggtggatcacgaggtcaggaattcaagaccagcctggccaagatggtgaaaccccatctctactaaaaatactaaaatcagctgggtgtgctggcaggcgcctgcctgtaatcacatttactcgggaggctgaggcagagaattgcttgaacctgggaggcggaggttgcagtgagccgagatcacaccacagcactccagcctgggtgacagagcgaggctctgtctcaaaaacaaaaacaaaaaacagacacttgtcatcagatttaggggtcacacagataatgcagtatcttgagatcctgaatgtaattatacccgcaaaacccttttttccaaataaggtcaccacaagttctggggattaggacatagacatatctttttggagaacgccatgcaacccactataatcagctataattatttttgtagaaaatgatgggaacctgacttaggatggtggccttggaaagaagtggctgggtttgcaatgtactttaatggtagagcagagaggcgttggtggtggttagaaacagaagctgaggggctgggcgcagtggcttacacctgtaatgtcagcactttgggaggccaaggcagttggatcacttgaggtcaggagttcaacaccagcctggccaacatggtgaaaccctgtctgtactaaaaatacaaaaattagtcaggtatggtggtgcatgcctgtaatcccagctactctggaggctgagacaggagaattgcttgaacgcaggaggcagaggttgcagtgagccataatcgtgccactgcactccagcctggtcaacagagtgagactccatctcaaaacaaacaaacaacaacaacaacaaaaacctgggtgtggtggctcatgcctgtaatcccagcacttggggaggccgaggtgagcggatcacttgaggtcaggagttcgaggtcagcctggccaacatggtgaaaccccgtctctaccaaaaatacaaaaattagccgggcgtagtgggtcatgcctgtaatcccagctacttgggagaatgaggcaggagaatcgcttgaacccaggaggcggaggttgcagtcagctgattgcaccactgtactccagcctgggcgaagagtgagactctgtctcaacaaccaccaaaaaaataaaagctgagggatgaggcaggtggtgactcagcgtttggatacagaactgtgtggctcaggactgggtttcaaaaagacccctctggggctatgtgggggacagactggagggagaaactagaagccagggagaagcctaaagtcagggtccaggtaggagagcaggagcccagagcctgcctgagccctcaggacagagaagaggggtggagtggagactcagcaggcaggagggatctggctaagagactgatgcgctgttggggaagaggggacaagatggagctttgacctcatgactagatagatggtggggctgcctcagatgaggaaaccaggtgagagaatttggggacatcagaggaaactgcagaggccactgggtgtgcacctgcaaccaggcactgcagacccagatctgactgtcaggatcccaggctcagtgcctcctcctctggggcctccgctcctcgggccccactgcagaggcaggaagtaccgcctgatgctcagcttccgctgggggtgttggcacggcccagcgccctccccactcccagggaccttcccacctcgagcctgtagcactttcacttccccaggtacccagcccctgcccccagcacctgggtgctccctggtccagaacaggctgcagactctgagaggcacaaaaacaagtggggaagggggagacagagaaaagaagacaggctgggcacagtggctcacgcccataatcccagcactttaggaggccaaggcaggaggatcacttgagcccagaaatttgagaccagcctaggcaacacagtgagactcccatctctacaaaaaatgaagaaaattagccaggcatggtggtgtgcacctgtagtcccagctacttgggaggctgaggtgcaaggattgctcgagcctgggaaggttggggctgcagtgagctatgatcgcactactgcattccagcctgggcgaccctgtctcaaaaacaaaaacaaaagagagatgaagagagaaaggaggaaggacccaaagaaggggccagaagcagagagaggccaggcacagtggctcacgcctgtaatcccaacactttgggaggccaaggcaggagggtcgcttgagtccaggagttccagaccagcctgggcaacctagtgagaccctatctctgtttttttttaattaaatataaaaaatacaacactcccactccatagcaagaccccatttctacaaaaaatacaaaaattagccaggcatggtagtgtgcacctgtaatcccagctactcagaaggcagaggtgggaggatagcttgagcccaggctacagtgagctgttttccccaccgtactccagcctgggtgaaaagtgagaccctgtctcaaaaagaaacaaatatataaataaaataaagaaacacagagagagggaggatagagaccccaggaggcaggaggacagagacccagaggagggagagactctgctgagataaggggacagagatggggagtagcaggaaggtggggacaaagacccagagaggaggaacaagagacccagggcaggaaatgggagacacagctggatgcagagatgggagagcttagcaggccatgaggtcagagtgtctgtgaggtcagctgctgtccagggtcagccctgaggtccccatgcccagaggtgggttccagtagatcaggggtccctttagatcccccagcgcctgagacatggagacctgggagggactgccccatgagtccttggtgcccacaaattccaaggcccctcaggtaccagagcatgtgtcccagtggagcaggtgagggagacagggacagagagagagacagaaagccaccttacatgaagcgggagtgggtggagccccacccctggaacttcctcttttggggttcttcctttctctctcagctctccgtctctctttctctctcagcctctttctttctccctgtctcccccactgtcagcacctcttctgtgtggtgagtggaccgcttaccccactaggtgaagatgtcagcccaggagagctgcctcagcctcatcaagtacttcctcttcgttttcaacctcttcttcttcgtgagttgcctcatggctacccagccggggcccagcccctgccgctaacccagccctcatcttcccctgtggcccacccccgtatccgcatctcctctccccaggtcctcggcagcctgatcttctgcttcggcatctggatcctcattgacaagaccagcttcgtgtcctttgtgggtgaggggggctggggcaggtgggagggcctcccccaacccaagcaacttcctggggtctcccttgtctcagggagacctacggtgccctactctgcaggcaggctacaggctcccatccactgctcaccggaggcttcttggagcctgagtcttcttccggcaaatggggttgtgcatacaaacaacaatgatcatgagagccatttctcaagcacttcctatctgtcgggacttgtggctggtcagatgcccccacaaaccttcccctcgcttgaggttcagagaggggaagccccttgatggatgtcatacagcaaggacgtaaaagagccaaaataacattaataataggaaaataataatgaagtatgaccctaaataataatgaaatataaccctaaacgctcatatttaagaagtctttgccctgtgttgaggactgggttgaacacatgtcctcatgtgtctctcaaaatgaccctaggggccgggcgcggtggctcacacctgtaattccagcactttgggaagccgaggcaggtggatcacttgaggtcaggagttcgagaatagcctggccaacatggtgaaaccctgtctctactcaaaaatacaaaacgttagccaggcatggtggcacatgcctgtagtcgcagctactagggaggctgaggcaggagaatcacttgaacctgggaggcagaggttgcagtgagccgagatcacatcactgcactccagcctgggggacagagcgaggctccaactcaaaaaaaaaccctaagaaatagatatcatctcctatgcctcagggaggtttaaggagccaagccaatgtcacagaacaagtgatagggctgaaactactggggacgaggaggagctgaaggaggaaggagagggtaagaggaagagagacagagatccagggacgggaaacaggcccagaaagaagagaaagtttcagaaggaaacagggactcagggtggggcagggacagagtcccagagagaggggcaccaagatactgctccccacttgggtggctgcctaggtgggaaatggggctgcctggagctgtgccacacagctcatcatcactcccctcacctctcccaggcttggccttcgtgcctctgcagatctggtccaaagtcctggccatctcaggaatcttcaccatgggcatcgccctcctgggttgtgtgggggccctcaaggagctccgctgcctcctgggcctggtgagtgcaccatccctctccgtccctaggaacactcctatccccaccctcaaaaatggcctgggccggggttgcaggggtggtcagcctgatctctccactctgctccccagtattttgggatgctgctgctcctgtttgccacacagatcaccctgggaatcctcatctccactcagcgggcccaggtgagcttcctgcagtggccaccacccacccccagcagggaggagagggaagggagtggtgggagagggtggagagagaccgaaacaagggcagacaggggctaacctagataaagagaaataagaggctgggcctggtggctcacgcctgtaatcccataatcccagcactttgggaggctgaggtgggagtccaggagtttgagaccagcctgggcaacatagtgagaccccatctatatttaaaaaaaaaatccgggtgtgatggtgtgcacctggggtcccagctacttgggaggtcgaggtgggaggatcacttgagccagggagtttgaggctacagtgagccatgcactcagcctgggtgacagagtgagaccctgtctcaaaaaataaattaatagaaagacacaccgacctggaccaagggagacaggcataaacagctccaaagggaaacacacgggaaaaagagagaacaagagaaagaaatagacgccctgaaagaagagacagagacttatgagccgtagaaatagtggaagaaacagaaagacagacctgaagtacacagagctagccattcagtaaggatttgagactggcccagagatgcacagggcccgcctgaggctggcacagcctgagagggggaggggtggggcggggaagataaggcccagcctcactggtggcctctcagctggagcgaagcttgcgggacgtcgtagagaaaaccatccaaaagtacggcaccaaccccgaggagaccgcggccgaggagagctgggactatgtgcagttccaggtaagcccccctcctccagttccctcccggactgacccgcctcagccctgtgcttggaggagactccaccccaacgtgggcccgacccccagctctacgatcctaacacaccccaatccctcccaggcccgacgctccccactccccagatgacacaactgtccccggcgtcgcctggtctcccagtacccagaccctggcgtggcttcgccatctacctcgagagactccgcccccgcccccgccccgaccagaggttgtcaggcccctagtcccaagaccctagcgagacacggcttcctaccccgtagtgactctggcttccaccggaccccgcccccgatgagactcacatggtctcgcactcctattcacctgtcgggtatcagaggctcaattgcaccacccacccaatctctagtccacagcgcgaccctgcagctccttccccagccccaggtcaccccgtgactcgtctttcccagccccatgttcccgtaatgtcccctggctccggccccatcgtgaccccagcccactgtcccccactccacacccaccacttagtcccctgctccccgacctgacctcatacccatcaccttgtcccctgatccccaacatcatatgtctccagtcccggtccctctgactcgtatccctctcccagctgcgctgctgcggctggcactacccgcaggactggttccaagtcctcatcctgagaggtaacgggtcggaggcgcaccgcgtgccctgctcctgctacaacttgtcggcgaccaacgactccacaatcctagataaggtgatcttgccccagctcagcaggcttggacacctggcgcggtccagacacagtgcagacatctgcgctgtccctgcagagagccacatctaccgcgaggtgggcaggggttcggagcataaacctgtcgaatggggcggggcctgcgggagggggagggctgtcagtgagtagcggcctgagaaagggcggggtctacgagaaaaggaaaggtacggcaggaggggcggggccctctgaagggggcggggtctgcaggaagggcagggcctaaagaaaaggctgggctggctctggaatacagatgtctagggaggggccaggcttggaaaaggtgaagcgagggtgcactagtaaggagactagagtgccctggtgactaggggagcgggtagatgcctgaagacggtgagggttggcctgaaaagaacgctgggcctgggcttgagagtcccagaaagaatccctttaacttttccctacaccccccagggctgcgcgcagggcctccagaagtggctgcacaacaaccttatttccatagtgggcatttgcctgggcgtcggcctactcgaggtgatctggccccgcccccacccgcgatcggccctaaatccctagatggccctgcccttcatttcgcgtccttcggttgcctgggaaggacgagctcagggcggagcgcagcccaccccggccctcccgccgctccacccagcaccggagggtgggggcggcccagcttcagggagccctgattgggtgtacgcagggaaagcctcctgctattggctgcgatctccctcccctttctccgcagatgactgtcatggtgctgagcgtacagctacagcgcagggcactccgccggaaatgcgagccgcacgtgccgggcgctggggattcgagccccgggcccagcctgatcgctgacggcggcggcgggcacagcggcagtctgtggggtggctggggcatggcgggtgcctgccccaactggggagacaaggcaccgcagggcaagctgcccatggccctggggctctggccgctgtgggttcaagacgaggaccagcctgacactggaagtgcgggcgcagaattagaggaggcacaattagaggctgaggcagagggggaagacagatgagcctccaaaataaaggaccctgggcttgcttccgaccttactccttctcagcctctacccccacttgtagcagctattcccgcctcatcagccagccctgcggcagttcccgtcgagccccgcccttttctacctatccccttctccagccccttcccgcccaattcacggccccacccctgacctttctcgcccgggtgggcatcacccccgtctcgccagcaccccttcgacttctctgacctcatctcctttctctatagctcgggttcatgacgctctcgatattcctgtgcagaaacctggaccacgtctacaaccggctcgctcgataccgttaggccccgccctccccaaagtcccgccccgcccccgtcacgtgcgctgggcacttccctgctgcctgtaaatatttgtttaatccccagttcgcctggagccctccgccttcacattcccctggggacccacgtggctgcgtgcccctgctgctgtcacctctcccacgggacctggggctttcgtccacagcttcctgtccccatctgtcggcctaccaccacccacaagattatttttcacccaaacctcaaataaatcccctgcgtttttggtaaaatagctttatcctctgtcagaacacaaacaaacaaactttgagaggggaggaaggaaaccgtctagctcagggctcacttaggagagggatgagattagaaagttcaacacactgcttgtgcagcggagataaagtcaagaccctagcacccacttataaatatctcgttatattaaaaaaaaaaaaaatgtccagggcccacctggctctgctcctgcacagaaagggttcatcttcactttgtgatctcacaggtcatggagtgagggtggtagagaggggcagaaatttcagggggaggggtggctgggaaaaagtaaaggggacaagccaatgtgtaactagcgctctccaagacatgcagaggagtgggggtggcctgtcaggggctgaaaagaaaagccagtgctgtacctggggggttgtctcactcctgtccccacaatccctgatactccggagtgatctgtcctttcagacacccactgtgaggtcccaatatcggggtttatcctttcctcagtcccagcctgttcagctctccaaccaagttttgggggcccctctaatgggggggatggccccagttgcttaggcctctgaggtcaacccctttacatcacagccctctccccaaataagaagcatgaggtgagctggaggaccctccctgggaggagggtgttctggggggtgagccagttttggggtcccccttcagtccctgaccaggcggtaaatgtgatgctgggccccacgctcgctggtggagacctcgaagacataggcggtgcagagcagcagttcctgggtgtctctgtttgtcaccacctgccaggaaggccaggacaagggacttatgcttagaagggagggcagggacccctgtgcccccctgccaagctatcatggaatacccagcaggctcttttccatctccaggaaacaggccgccaccatatcatgttccccaggagaaagggatgcccaaaagtcagttccctgggcaatgggggttacccctcagctgagcgttggcagttatggtgtatcacatctcagggttaatcgggttcccatcacatcacattccctgggtaaaaggggtccccatcatgtcacaagtaaagggagaaccctccctgcaggttccgcggtcaaggggtctctgcctcagcagtccaaaaagttaaaggggctcccaccatatcatgttccttgacaagctgaggatctgccttcgagtgccctccagtcagcttcaccagggaaggagggacccaccttatgtgcgagtgctgtggggctgggcgtggtggctcacacctgtaatcccagcactttgggaggcctaggcaggtggatcacttgaggtcggagatcaagaccaacctggccaacatggtgaaaccccatctctactaaaaatacaaaaattagccaggcgtggtggggcgtgcctgtaatcccagctactcgggaggctgaggca[137 bp omitted]gaagggtcccctaaactaagggtcaatggtggggtccccgctgcatcagtttcctagttaaaagagcctcaggctgagggctcactttggagtccctgctgtgtcagttcctgggtgaggagatcccctagactgagggtctgttataggtactgtccctccacactggggggccccactccagcccagccccaggcatcacctggaggatggtgaagttttccaggacgctgttcatcatgtatcgctcaggcagctgccgcaacttgtgcaagaaattcaccaggtactcgcacatgggcgagcgcagcaggcggtacacaaatctgccgtcctccagctgggcccgttccgtctgaaccaaggggaagggagttgggaaaatggtggctgagagacccacgggtcaccccaggaattgagctccaccctgtgcctctaagatgccaccacactcactctcactgccaccttcctttcatcaccccacccacagtgactggagactgggcctgaaccctcggagatccgaatcaggatctctgagcctgcaaatcacaagcccctcaaagtgattctctgaacccccaaagacctctggactcctctaacctcccagccctcagataccctccaaagacccctccatgacgtcttcaaactctgacttctaaacttgagacttccccaagtctccagcaactgtaagtgtgacttctgaaccttcttgccctaagaacctctccatatccataagacccttctcaatctcagtgactctaagtctctatactacacattacctgtcagcccgcagaatgatccctgcctgtgacttctgaactgcccattagctcccaacgcatgcattaaaccctcaaagaggctgggacccactccctccatgcatactcccaaatgcctgagtcatgatggcttctggtccattctgcacccccaagtgctgacccagagctccacccctccagcctcacctccaccttctccaccacctgcttgccaaaagagcagaccttggaggaacaggtgagggtcatgtgttccaggctctcatactggctgctcactccgtagaagccaccactgctgatgctgccaccggcccctgcctcctcaccacttgggccccagttcaggtccgcctgggagatgggaaggcacagatgagtcagaggggacatcccttataaacagtggggactaccaggcgcagtggttcacacctgtaatcccagtactttgggaggccgaggcgggcggatcacctgaggttgggagttcaagaccagcctgaccaacatggagaaaccccatctctactaaaaatacaaaattagccgggcgtggtggtgcatgcttgtaatcccagctactgggacactgacgcaggagaatcacttgaacccgggaggcagaggttgcggtgagccgagatcataccattgcactccagcctgagcaacgagagcgaaactccatcttaaaaaaaaaaaaaacacagtggggactctgccccatagcctaccattacccctgcagttcccggcttgattcttcagtgttgttttgtttttttgttgtttgtttgtctttttttttgggggggggggaacagggtcttgctccgtcacccaggcaatgtgtggtggtacaatcacagctcactgcagcctcgacctcctgagctcaagtgatcctcccatctcagcctcctgagtagctaggaccacaggtgcatgccaccacatccagctaatattttgtattttttgtagaaacagggtttcaccatgttgcccaggctggtctccaactcctgggctcaagcgatcctcccaccttggcctccgaaagtgctgggattacaggcatgagccaccgcgtcaggctttcaaagttctccaagggctggtttctggagaagatccaccgtccatcagcgttgaagaagtctgggtccccaaaacagtcttggccctgtctccccagtaaccaaaggagccctggaattcaatttcaaccttttttcttttcttttttttttttctgagatgaagtctcgctcttgttgcccagtgcaatgccgcgatcttgactcactgcaacctctgcctcccgggttcaagcgattctcctgcctcagcctcccaagtggctgggattacaggcgcacgccaccatgtctggctaatttttgtatttttagtagagacagggttttgtcatgttggccaggttggtctcaaactcctgaactcaggtgatccacccacctaggcctcccaaagtgctgagattacaggcatgagccactgtgtccagccaattcaacctttttcccttgaagcccgcaactcaagagttcagccccttccaagggcctggttactatggcagttacttcttagcaaccagttcaagatgaatacctccctctaagcccctctcactctggttgctaaggcaagtggctactccctagcaacgggacctcacggagcctgaggaggcctgactcctcctcagagcacttccccctcggccaaatctgagaggtcagactccctccatgaccccagtggccaagtgtgtgtagacagctggccaagtgtcactaggccaagtggggcctaaggaagcctaagagctcatcacacctttggtctgagtcacctccttgcgaggcgcacctcttcctcttcctaactttagttgctaacactgtgccaggtccgtcttctcaggggcccgactccatctctcaccgtggcaaaaccaaagaccttaccagctgctcctctgaaccccttcagcagctgggcttcctaagggggtggctctccagtcctgggacctgataaggcctgtcttaagccccaacaatgtctaagccctcagctgcacatccccagagcagtttcaggcttctgcttcacatggcagaaagctccagaaccgtgaacagcaagctccagaacaacaacactcccagcaagaacagtaaagttcaggccctcagcaggcctttccttcctttccttccttccttccttctttctttccttctttcttttctttcctttctttccttcttcctttcttcctttctttctttcggcagggtctcattctgtcacccaggctggagggcagtggcacaatcttggctcactgcagcctccacctcccaggcttaagtgatcctcctgcctcagcctccacagaagctaggaccacaggtgcgcaccaccacacccagctaatttttttcattttttgtagagttgaggtctcactgtgttgcccaggctggtgtcaaactcttgaacacaagcgaaactctcgcctcagcttcccaaagtgctgggaagataggagtgaaccaccacacctagccaggctttcttctcagagactagatccctccaccacctttgttactataagaactagcaccccctaaacatccaggcaacatttattgagcccaggccaggcactgtggctcacacttgtaatcccagcactttgggaggccaaggtgggtggatcacttgaggtcaggagttcgagaccagactggccaacatggtaaaaccctgtctctactaaaaatacaaaaattaggccaggtgcagtggctcatgcctgtaatcccagcacttggagaggccaaggtgagcggatcacatgaggtcaggagttcaagatcagcctggccaacatgacgaaactccgtctctactaaaaatacaaaaattagctgggcatggtcgtgcatgcctgtaatcccagctacttgggaggctgaggctggagaatcgcttgaacccaggaggcagaggttgcagtgagccgagatcgcaccattgcactccagcctgggcaacaagagcaaaattccatctcaaaaaaaaaaaaaaaaaaaacaataaaagaaaataaaacacatttattgaacccctgtagtgttagtcatcatactggacaccaaaccaagtagccctaagaaacacgcaagatgggccctcttagtcccaatcatataaatagcagctgacaccaggcgtctatataggaagtgctcaataaatgattgctacataaatacaggacttggacgggtgcggtggctcacacctgtaatcccagcactttgggaggccaaggtgggcagatcatttgaggccaggagttcaagaccagcctggccaacatggtgaaaccccgtctgtactaaatatacaaaaattagccagatgtggtggcgggtgcctgtagtccaatctactggggaggctgaggcaggagaatcgcttgaatccaggaggcggaggttgccgtgagccaagatacagccactgcactccagcctgggtgacagtgagactatgtctcaaaaataaataaataaacaaataaatgaatacaggacttggcaaagccactccatggctcttttcatcacttcctcaaagccagacattctctagcaacaaggtctggtgaaactgatgcaaagcatcagtcccctctttagaaaccagtctccacaagtccactggctacggggaggggtctttccttagcagcacggcttggtgcagtcaggtggggcacagggaagcctggaacatggcaagcccatgcccaggaccctattagctacatggccaggtaactcaccgtattagttacatgtggcaatgtctagtgggatccagggaggcccagacacctccaacccaccctgggggctggcctcctcggtgttccttgttgcaaagggggctgacactccaagccatgaggactgactggtaagtcccaggctgacctggtagggcccgcgacagattctctcagggccagaggcctttgctgggacaccacaggatttgtgagcacttttgattttgctgtgagaactcacccagaacttgaccaggaagaaggcatggggggggccacgatcatatagctctcggaggccaccctttttctcagggaatttgtcgtagatctgccggacgtccacactctcgagcggcggcgctccggggctggggcagtgctggctgatgtgcacgaacaggtgcctctggtactgaggagggttggccgtgggtgagaagtcggaggtgagctggatctccagcctgtgctgcctgagcccaccaaatgccgtcaccatccccacagctctggccagctgttccacacagtccacccagcactgggcctgactgccacccatcgtccccactcctgcttctgcacccagtcccctgcagccctgcagtcctacagtccccaactccctgccacaactcccccaactccatcctcactgcctcagcctcacctcaggcctcccaccctcaccccagcctccaacctcgcctctccagttcatccctcatgtggctccagacctgcccctgaccctcccctggtcatggccctcccatagctccccagcagccccagggcaaagctcacaccccctaggcctggtcctatatagaacaggtgctcataaatggtcaatggatggaagagtgaatgaatgggaatccacagaggtcttgtggttgatgttttgattgatgtttatatggtgtggcagagactgctacgtgttcacaaatcctggttcctttacacagtgtgaaactacatttcccaggccgctttgcagttaggtgtgaccacatgactaagttctggccaatgggatgtgaccaggcctgagagtcgacacatccaagtcagattcctaaaacctcctgcacaatcttgactctctcccttcctccatctgctggccagatgcagagactccatcagcagattctgaagccttagaaaatggcagagccacaaaatggaaggagcctggatccccaaatcacttgagtccaaggctcctgctgaacctacattgaaatgttacatgcaacttatctggcattcagtccctaagagttaggagctgtttcttctaacagtcggcccactccatcctagcccaggagaagctcaagcacagaaataaaatcttttccaagttcctagtatgcatcacaaagcctagtgaacagtagaaactcaaacacgtttgataaatgaatgaatgatgtcctggggagcttttctgaccttcccaacttgtcaccctatgaccttccagttcctttatgctagtagttctcaaagtacggtccccagaccagctgcatcaacgcacctggtagcttattagaaatgcaaattctcaagccccacatcacatctagcaaatcagaaagcaatctctgttttaagaagcccttcagatgattctgatacatgctaaagttttaaaaccatgactttatacattcccttcctgtcaccctctatatttcaaaatccctcagcgactgtaccaaaatttcactcacagaatcaactgcatctggcggttccacgaaggctgagaactctaccagctgcaaccgggcggtgcccaggccccgagcctgccaggctgggggcgatggggtaggtgggggcaggggtgagagggcttgggggggctcgtaccctagagagagagaagaaagaacaatacaaattgctaacatttatggaatatatcaggtactgttgtctcttgcctgcctccacttagaagctgaaaaagctaaatactcactttcccagcctcccttgcagttagaagtggccatgtgacacagtcctagccaatgagacgttaggggaaatctgctggggggcttctgggaaggagtttcttcctgaatgaaaaagacagaactttgggaggagaaagcttttggccctggccaagtcctgcttgggagattgatatggtttggatatttgtcccctccaaatctcatgttgaaatgtgatccccagctgggcacggtggctcacacctgtaatcccagcactttgggaggccaacgcaggtggatcacaaggtcaggagattgagaccgtcctggctaacatggtgaaaccctgtctctactaaaaatacaaaatattagctgggcatggtggcacgtgcctgtaatcccagctacttaggaggctgaggcaggagaatggcttgaacccagga[137 bp omitted]tgggggtggatccctcatgaatgtcttggtgccttccccatagtaacaagtgaattctcactctttgagttgatgtgagctggctgtttaaaggagcctggcttcgctctcttgctccctctcaccatgtgacatagtggctccccttccccttccaccatggtcctaagcttcctgaggccctcaccagaagcataggctggcaacatgcttcctgtacagcctgcagaactgtgaaccaaataaacctcttttctttataaatcacccagtttcaggcattcctttacagcaatgcaaatggaccaacacagacatgatccctggagttgcaacagccatcttgggacaataagacagacatgagaggaactacagagattccagtcctgatattgctaagcccacacgggaacagcccacctccaggctttttgttgcatggattcataacatgaatgcttttactatttaaggcacttttaatgtgggtcttctgttacttgcagccaaaagtattcctaattgataaatctatggaaactaagggactccctctttcactgatgtgagttctcagggccatatcagcatggacttccagaagccatctttgctgccaagtagctgagtctgcctgggaatgaagccaccacagtggaaagcagatcaaagtaatgactgatgccatcacttgagccgctggatccagccacgcctgaggccataattctgaactgtcagttactggaaccaataaatcaatacatttttcttattattttttattttatttatttatttattttgagacagagtcttgctctgtcgcccagtctggagtgcaacggtgccacctcggctcactgcaacctctgcctcccaggttcaagtgattctcctgcctcagcctcccgagtagctgggattacaggcaagtgctactgctaccacgcctggctaatttttgtattttttagtagaggttggggggggtggtttcgccatgttggccaggttggtctcgaactcctgacctcaggtgatccacccgcctaggcctcccaaagtgctgggattacagctgtgagccaccgcacctgcctcttcttttttaaaatgttgcttcagctggcttgatttggatttctatcacttgcagctgaaagaatcttgactaacatacctcccccatgtctcataagctagcaagtggcagaacacaaacccagtgtgtggctgcaaagaccaaaatctcctaaccatcaccagttccaccactcagctctccagcccctcccggctcccccgcccccaacacacacaccctgcctcaaagctgggcttcagtaagaatgtatcccctaattggccgggtgcggtggctcacacctgtaatcccagcactttggaaagccgaggcaggcggatcacaatatcaaaagatcgagaccatcctggtcaacatggtgaaacccgatctctactaaaaatacaaaaattagcccggcatggtggcgggcacctgtaatcccagccactcgggaggctgaggcaggagaatcacttgaacccaggaggcggaggttgcagtgagccgagatcacgccactgcactccagcctggcgacagagggagactccatctcaaaacaaaacaaaataaaacaaaaaaaacaatgtatccctcaattgatggaaggttgaaggaaaggcagtaggggtcgaagagagagaggggagacaagggagggtggagcgcaggctcttacctgggaggtcagtagatgggggagtcagtgacaaggtgaacggtgtctgtgagaatggcttcacactgagggaaaaaggaagccaggggttagccaggtagaaagatgctaatgtcaccagcaaatgtttactgagaggccacaacaagcaagaccctgtgcattttgtgcacaatctcactgaagcctcacagtgcgtgaggtaggtagaatgactgctcttttcattgcacaaatgaggacaactgaggtatagaggggtcaactgacctgcccaaagtcacacagttgagatgcagcagagctgggacttgaacccaggtcagtctcagcccggtatctcaggctcttgatgatgacattttggtatctctcacaaaatgtcagaaagagaagagaaaccagcctggcgtggtggctcacacctgtaatcccagcacttcaggaggttgaggcgggcagatcacttgaggtcaggagttcgagaccagcctggccaacatggtgaaatcccatctctactaaaaatacaaaaattagcagagtgtggtggtgcgcgcctgtaatccgagctattcagggggctgggccaggagaactgcttgaacccgggaggcagatgttgcagtgagccgagattacgccattatactcctgggtgacagagcaagactccatttcaaaaaaaaaataaaaagaaagaggagagaagagaaaccaagtcttggaaggcagggagaagacgcagaagacaaggaatttggaggaagaagaggctgaggggttgggagggtgggaagaaaatgaccaacactcaggagatgggacaggaggccaaagtcggggtggggaggcagcactggccaatagaactttccagggatggaaatgttctattggatggaaatctgtgccatccaatacggtacccagtgcccacatgtggctactgaccacagaccacgtggccactgagcacaagtgtggctcatggacctgagaaacagaatctttaattttatttaattttaatttaaatagctgcatgaggctagtggctacagtatcagtcacagccctagtagcccaagagatagtggtgaagagacttagatgtcagaggtcagaccaggcgcagtcgctcacgcctgtattcccaccactttgggaggccaaggcaggaagatcgcttgagcccaggagtttgagaccagcctgggcaacacagcaagaccccagctctatttttttttgagacagagttttgctcttgttgcccaggccggactgcaatggcgtgatcttggctcaccgcaacctccgcctcctgcattcaagcgattctcctgcctcagccttccaagtagctaggattattacaggctgtgccaccacacccagctaattttgtatttttttagtagagacggggtttcactgtgttggtcaggctggtctcgaactcctgacctcaaatgatccacccacctcggtctcccaaagtgctgggattacaggcatgagccactatgcctggcctccttttcttattaattctttgtttatatgtttattgtctgtctcctcccccgcccaccaaatatatgaagctccgtgaaggcaggaatttcacctgtcttactgctgtgcccccaaaccaagcacagtatcaggcacttagtaggcactcaacaaatactggactggcctcctctagattcctggaacccagaaagatctcctacctgaggactttgtcgtgtgctattgtgtctgcctaatatattcccactcccattctttttttttttcctttgagatagagtctcgctctgttgcccaggctggagtgcagtggcacaatctcagctccctgcaacctctgcttcccaggttcaagcgattctcctgcctcaggctccggagtagctgggattacaggcgcacatcaccatgcctggctattttttgcattttaggtagagatggggttttactatgctggacaggctggtctcgaactcctgacctcaagtgatctgccctccttggcctcccaaagtgctgggattacagatgcgggccaccatgccgggcctcccactcccattcttcacctggctaagtcctacccggccttcaatgttatcttctcagagaaacccctagaactttctcctccaccccagaacctgctgtggttcttcacagcacctcacacattcttcgattttctgtttatgcaggtgatgatttgatgaacgctcatttcccccatttgactaacagctccatgaaagcggaaaccccagcgtcagggcagtgcctgcccagccccctaccttccagctaagcaacccccctgcaaaaccctcagcccccaggtacttgatctgatgcttcccgtatccccattcagcagcagctccccagtgaccttccttctcttccagtctagatcccacacagcctgtcactgcactcttttttttttttttgagctggagtctcgctctattgcccaggctggagtacagtggcacaatcttggctcaatgcaacctctgcctcctgggttcaagtgattctcctgcctcaccctcctgagtagctgggactacaggtgcctgccaccacgcccagctaattgttttttgtttt[176 bp omitted]gcctcaccgtcctgcagccacactacccaaccaatgcctagcc[137 bp omitted]acatagcaagacccccgtctctacaaaaatcaaaaaattagccaggtgtggtggcacatgcctgtagtctcagctactcaggaggctgaggcaagaagattgcttgaacccaggaggctgaggctgcagtgagccatgattgtgccaccgcaccccagcttaggcaacagaagaatatcctgtataaaaaaagaaaaaaaaaaaaaagcacttcccatcatcttctggggcccatttctattcttgtaggctacaaacatatcccgtcacctcaaggctctctcagaactgaaaaggacactcccacttacctctgggaaacattttcttccttctgaacctaagagaagattaattataacctctgttctaccctcaggtccaagaaccacctaatagaggctgggcacggtggctcacgcctgtaatcctagcatttggggaggctgaggcgggtggatcacgaggtcaggagttcaagaccagcctggccaacgtggtgaaaacccatctctactaaaaatacaaaaattagccgtgcatagaggcaggcgcctatagtcccagctactcgggaggctgaggcaggagaactgcttgaactcaggaagcggaggttgcagtgagccgagatcgcaccactgtactccatccagcctgggcaacggagcaagactccatgtcaataaatacatacatacatgcatacatacatacatacatacatacataaatggggggacacaggagctagaaggtggagtgagaaaggtctctgtgggagtgtgagggtggggggcaggtgctgagccaggacacatagtactcactctggaacattccaggggggcccagatcctccagaccaaaactggaaaagctcagaggcctggataggacacaaagaaaaatggttggtcagtcccctgtggacagctgcagccccatccatccccctttgcccccacgtcccacaatccccaacctggaccacctgaggaccagtgggacccagtttggcctgcagagaaggcgcggagatgagctgggcagaggacatggttgccattgtctggaaagccttgtccttggaaacctggtcctggaggaggaggcggaagttcatgtgagaggggcatctcagtcaacatggcaagagggggatggtgccagggtggggtgaagacggggaggtgcagaggtggggagtcaaggcaaagggttagtggccgggcatggtggctcacgcctgtaatcccagcactctgggagccggaggcgggcagatcacttgaggtcaggagttcagtatcagcctggccaatatggtgaaaccctgtctctactaaaaatacaaaaactagccaggtgtggtggtgcacacgcataatcccagctactagggaagctagggcacaacaatcactggaacccaggaggcagaggttgcagtgagtggagatcgtgcccctgcatccagcttaggcgacagagcaagaccctgtctccaaaaagaaaaaaaaaggcaaaggcttgggttgggggagggttgaacctctccccacagccctctgcccctcctcagggacagggcactagtttggagtgagcgtgggtgggaggatgggcagaggaacttaccacgttcagagcctgcccgtgggggtgggggagggtgccaaaggaggaaagaaaacatgacttaggaagtacggcccggactcccccacctccctgccctacccgcccgcacagccccgccaccctgagctgagcagtgccaagggatggatgcgcaacaggaagtggaggtggccagccctggaggggaaaaggggctccctgcccagaaagacagtgatgggggtttctagaacaaggaaacccagaaggttcccagatgtccaggagacaggaaatgagaatttcagagccagcgggaagacaaggtaaatgtttcctaatccagacagaacagacagggaacacagaaggtcgagaacagaccggaagggaagggtttcagacctagagagaaagaaagggaaagctgctggatacaaaaaaaaaaaaaaaaaaaaaaccagaagcgaccgtccccaagtccagaaaaagagacagaaaaacccccacacacccagaagggggagaaaatgagggtctccggccaacaggaaccaggaaatccaaaggatgaggagaaggaaatgaatgaggaatctccaccaggaaatgaagatttctgggcacaaagagtaggcaggtcatgcaaaggtcaggaaatgggaaaacaaaccagcggagatgaagaggaggccttcacagcacaagagggggaagatatgagaccgccaggaagagggaaaggagggacaggagcagagggaagggagggggacaggaacagtggtcaagggaggggaccgacggcccatccttcctgctgtcctgagcaaaaccttcagcctcctccatgccatcgctccctgcccagggtctcagcaaccgcaccaccatccctatgcatctccctttgtgggccactgactccccaccctggatgactgcaccccccgccctgaccacagaggtccctcacctgaggtctctgtccccctctgtctctgggtctctgtctccctctgtctctgggtctctgtccccctctgtctatgggtctctgtccctctctctctgggtctctgtcctcctctctttctgggtctctgtccctctctctctgggtcttggtcccctcccccaagtctctgtccccctctccctgggtctctgtccctttctctctgggtctcagtcctccccgctctaagtctctgtccccctctccctgggtctctgtccctctctttctgggtctcggtcccccacccccagtctctgtccccctctcaggatgtctgcattggtccctaccttcaacttggactggatttcccttgatttccttcgggccaaaacctggatgtgactagaaacctggaaggatcaacggagaagcagattcaggccacagccaccgcccctgtgttcactaccccttctctccctccaggtgcctcactgagctgctggaccatgaaaggtgaaaaacacactgaagatgagagccatctcgggagcacccgaacacagatgtccataaaggagctcgtgaacaccacggaccctcccgggacccatcccatccaggcctccttcccctccaccatgctctctctgtggctactctgggtctaacacaaccactagaaaaactatccccaaacaggcacagtgagagcacacgaacagacatgctgatacagttcggacattcgtcccttccaaatttcatattgaaatgccatctccagtgttggaggtgaggcctggtgggaggtattggatcatggaggtgaacccctcatgaatggctttgcaccatctccttgatgatgagtgacttctcactcagttcacacaagatctggttgtttaggccaggtgtggtggctcacgcctgtaatcccaacactttgggaggcctagatgggcagatcactggaggtcaggagttcaagaccagcctggccaacatggtgaaa[142 bp omitted]tctactaaacatacaaaaaattagccaggtgtggtggtgcgcgcctgtagtcccagctactcaggaggctgaagcaagagaatcgcttgaacccgggaggcggggcttccagtgagccaagatcacgccactgcactccagcctgggcaacagagcgagactccgtctcaaaaaaatatttaaaaaatgaaaaaataaaaatttgccagatgtggaggcgcatgcttgtaatcccagatacttggaaggctgaggcagcagaatcgcttgaacccggaaggcggaggctgcagtgagctgagatcacggcactgcactccagcttgggagacacagtgacttttctctcaaaaacaacaacaacaaaaagatctgggtgtttaaaaagagtctgggacctctgtctttcttctgttgctcccactttccatgtgccaggcctgctcccactaccccctccgccatgattggaggcttcctgaggcctcaccaggagcagatgccagctccatgcttcctggacagcctgcagaactgtgagccaaaataaagctcttttctttctttctttctttttttttttttttgaggtggagtctggctctgtcaccaggctggagtgcagtagcacgatcttggctcactgcaacctccgcctcccgggttcaagcgattttcgtgcctc[134 bp omitted]agtgctgggataacaggcatgagccactggcccagcctaaagctctttatcaattatccagccttgccaggcacagtagctcacgcctgtaatcccagcaatcccagcactttggggggctgaggtgagtggatcacctgaggtcaggagttcgagaccagcctggacaacatggtgaaaccccatctctactaaaaatacaaaattacccaggcatggtagtgcatgtctgtaatccctgctactcgggaggctgagacaggagaattgcttgaacccgggaggcagaggttgcagtgagccaagatcgcgccactgcactccggcctgggcaacagagctagactccatttcaaaaaataaacaaatacataaataacccagcctcgggtaattctttatagcaatacaaacggactaacacacatgccgagaagacagatgaacgcacaggaagcagcttcttccttgaacctgaacctgcccatgcgaggatgaccctaagaagaccggcccatcccagacagaagcccacaagtccattccgagacctgttttcgagttcgggtcttccccgttctcagcttgatgtagcgggcgatcagttcattccgacctgaagattcaaagacggaacagagttagttagactttcaacagaacttccccacagcatggacaccagggaagaagaaagcagcatgggtccccaaaggtctgcagcaagtgggctgccggtcccctcagctacgtggaagccagactgcttgggttcaaatcccagctccatcacgcactggctctgtgcgaccataagcaaatcacttaacctagctgtgcctcagtttcctcatctgtgcaaatggtgatgctagctcctacttcagagtgctccataaaccttggttactgtcattattcatcagtgggggccagggcaaaagacagaagtagactcaccatacatcttgccttcatcagacaaaattattttccggcggccgcagggtggatagatggccagggcctcctggaagctctgctcaatgtctgggctccacaccccctctgcatccgggcccccgtcacccccagccccctcactgccgccggtaccctcctcactgccttcctcactgcccgtccagccgctgccatcgtccagggcggccccagcccggggttcccccatctgggcctggaggaacacagaactcagcaagcttcccccaaaccccaccctcaagggacttgaagctgagagggctgggactctggaccactgggtctgagggaggaggggctggggacctggactcctgggtctgagggaagaggagctggggggtattcctgggtctgagggaggaggatctggggcctgaactcctgagtctgagggaggaggggctggggcccggactcctaggactgagggaggaggatctggggcctggactcctgggtctgagggagcgggggctggaggcctggactcctgggtgtgagggagaaggggctggggtctggactcctgagtctgagggaggagaaggagctggatttcttggaaagctgaggatgggagtgttctcagagtttccagaggaactcaattgtgatgaagtcacaatgattaccctagagtaatgccgagggccatgaaggctaaaggttcgggtatgaattacgggttttaaagaagacaggaggcaaaagttagtggtggggaaggaaggtgtgggtgaaacttcccctgtcccaccccaagaacaggtggtaagatgtgagcagcagctgccagaaaagaagaggggccaagcaagactgaggggaggtctagagagagggggacagagacccagagagggagggggacagagacccagagaggggatggggacagagaccagcaagggggggggacagagacccagagagagaaggggacagagaccagagagagagggggacagagaccagtgaggtggggatagagacccagagacagagggggacagagaccagagagagaaggggacagagacccagtgaagggggggacagagaccagtgacggaggggacagagacccagagagagagggggacagagaccagagggagggggggacagagaccagagggagggggggacagagaccagagagggggacagagacccagagagagggacagagacccaaaaagagagggagacagagacccagggagagggggagacagagaccagaaagagggggacagagaccgggggggggggacagggaccagagagaggggtccagaggcccagagagggagacagagacccagagagagagggtgacagagacccagagagagggggacagagacccagagagagagggacagagacccagagagagaggggaccagagacccagagagagggggacacagactcagagagagggggacagaggctcagagagagggcaacagagacccagagaaagggagacggagacctagaaagggcagggacagagactcagggcagcagctgaggccgagaccaggagagacccacagaaccacaagctgggggacaggggcgccctgccatcagaagagccagaacaaagggcccaggcgtcccctcccccagcttcccacaacccccatcaggggaggggcttgccggccagggcgactcccctccggcaccgggccccgcccctcccctcccccgtgcgccgtgggctctgatccaactcaagttcccagtgactttccggaggccgggaacagggaaaactttttccaatacagtcagatcccgcctccccggaggctccatgtcctccacagctttcccaggaccccagagtccaggcccctattcccctcctcccgccgaccatagcagacaaagaccccagccaagcccagtggcgctgcggcgttcaggacccccgtaggccaaaatcccagcccagcccttccccatgtggccagacaaagggacggtggagccgggtaagaaaggtccccctaatttcccgccccagaccctaaacctccaaagaggcaagacttaagatccagaaagccccgtaacctcccctcggccaccccagaggccctcccttctccgtaagaaggaccaaatgccccccagattacacaaggggtccttctcactccaaagtgacaccgccgcagacgcacgccccacaccccgccagcgcccttggcccgcacccgctcctgcgcgcacgcccaaactcagacccagccgcaggcaccctaactccggccagagttcccactcctcactgaggctcggtcacgggagcaaattcgggcccccgggcaaaaagagggctgcgaaccattcagagacggtcccgcaaacgcacgcctcacctcctaagaagcaactccccaccccaactcacacaccccaaagcaggatccccgactcccgccggcgccttcctacctcccggcctggggctggggagccgcgggcgggcggggcgctgcgagggagaaagttgccgggagctttgtttgggaaaagtgggagggaccggaggggggggcgggcccggccggcggacagcgggaagggggatccgacggtgacagtttggggaaggatttttgctttgggagagattagtctatctcggggctggtaggaactcaggatttgggtgcttgggaaaggagggggattgggggttcggactccaagtcggagggaaaaggctgataggagccagaaacccctgatctgagggaggagaggctgggggctgggactcctgggtctgggggctgggactcctgggtctgggagaggaagcggctggagagagatatgggctcctaggtctgagaggggacggggctaggcgcctggaatcccggctaccctcgtgtttgtgtattgggggtgcggaagtgatacgaatacaaagagtctttactgttaagccctgaggttttttttctttttttctgtttggtttttggtttttttgttttttgttttttttgtttttttttttttttgaggattggggtctggggatgggttttgactgattcctatgacgacctggtttccttgtgacctcaccacagttaagagtcgtgggcaggaccaccgggagtttattggaggcccacgtaggtgcagattcctcatctacaggcgctagtggactggagacggctggcggctgtcccgggacggggaagagagctttggtgcctgagggaagatggcttagggcccggtcccttaagggtgaaaggctgcgtgttcaaaattacgggactagagggggcgggagtccggacctgaggtcctcagggaaaaggaagtctgattctgggttccttggaagatgaaatataagactggatttagggtttccggagacaacgggactttttagtggagcgggagcgggaaaaccagaagggacacggagaaaaggttccgaaacagatacacaattagagtgagagctaaaagggatgcttgtactccggtgtctccagtaggaggagcctaggactggaacttggggtgatgagggcaagatctgggacgcaggggcgtggtccagtgcaggggcgtggcccagtgcaggggcgtggctttcagccaaggggcgtggccattgcgattgggcgggactccgaaacgagggccgcaatcagagaacaccgccaggacttccaggacttggtctccaggactgaggtcaactgacgtgggcgtggtctgactgtgtgggcgtggccagggaatgaactcacggctctggcttaaggggtgtggtgaacgaaggatggggcgtggctgtgtcaccaagggcgtggtcatggagtagaggcccgggctcctgggtgaggccggcaagtttggagcgtggtcagacaataggggcgtggctacggctcgcggagcgcaaccaacgctctagaccagacctgggctcgagaccataactgtttggctttaacagtacgtgggcggccggaatccgggagtccggtgacccgggctgtggtctagcataaaggcggagcccagaagaaggggcggggtatgggagaaggtgaggattgagatctggtggtgaacgtgggcgaaagtgaggaaaagaccattggatgaggccgggtgctgtggcttacgcctgcaatcccaacactttgggaggcccaggtgggcggatcgcttgagatcaggagttcgagaccagcctgggcaatatgtcgaaaccctgtctctacaaaaaatacaaaaattagccgggcgtggaggcgcgcgcctgtggtcccagctacttcggggggctgaggtgggagaatcacctgagcccggggaggtcgaggctgcagtgagccgtgattgtgccactgtactccagcctggactacagagtctcggtctcaaaaaaaaaaaaaaaaaagcatatgagacagaacccagaagagccagacctgggagaagacggggcctggcaaggtggagggtgtgggagtagaagaaagaagcagtgggggaaatgagcgcggtgtgggagttgcctgaactggggaggcgacctgggcaaggtgctggagaggggcgtcttgggtgggggcgtggccactgtgcggggctctgaccccgacccttgccacagcctccccacctgcccccgcaaggcggcatctgctggtcctgctgctgctcctctctaccctggtgatcccctccgctgcagctcctatccatgatgctgacgcccaagagagctccttgggtctcacaggcctccagagcctactccaaggcttcagccgacttttcctgaaagtaagcgatggcggggggatgggggaagaagtactgagaagaggttcagggacacagagtgggagatggttcagggccaggcagggggacagacaggatgagagggcaacagggagaccaagagataggaagagggaagggactgggcccaggctataatcacagcactttgggaggctgaggcagaaggatcattggagcccagtacttggagaccagcctgggtaacatagtgagaccctcatctgtacaaaaaaatataaaaaatagttgcaggtacatgcgcctataatcccagctgcttgggaggctgaggcagaaggatcccttgagcccaggaggtcgaggctgcagtaagccatgatagcaccactgcactccagcctggatgacagaacaaggagaccctgtctctaaacaaataaatatatacgtgcataaataagagaggaaaggtaacaggcaaagagagaggagatgggacagagacaagagactggggaaagagacaggaggagagggggatggggacagaagaggaacagggatagtaaggcaatgggactgagaatagagagagaattcatgggggatggaggccggaggttaggccctaagtatcagagggcagaaagtaaaggggatgggagggacttggggcaaggcctcgggagcatcctagcagggctgcagaaggggctgtactgaggagatgtgaggtccagcagctcaccagtccctcctccggccccagggtaacctgcttcggggcatagacagcttattctctgcccccatggacttccggggcctccctgggaactaccacaaagaggagaaccaggagcaccagctggggaacaacaccctctccagccacctccagatcgacaaggtgcctatgcagggaagcccttcctgaagtccccttgggatccctccatcccgccatccctcgtgctgcagtatctgttgggagggaaggagggcggaggaggaaagcaggtttgctctcactctctcatcggatcctcacagatgaccgacaacaagacaggagaggtgctgatctccgagaatgtggtggcatccattcaaccagcggaggggagcttcgagggtgatttgaaggttaggacgtgccccgccgtcaaagtgtccaggcccaaacattttctttttttcttttttaaagaagagtctcactctgtcacccaggctggagtgcagtggcacgatcttggctcactgcaacctccgcctccgaagttcaggcaattctcctgcctcaagctccttggtagctgggattacaggcacctgccaccacgcccggctaattttttgtatttttttagtagagacagggtttctccatgttggtcaggctggtcttgaactcctgacctcaagtgatctgcccatcttggccttccaaagtgctgggattacaggcatgagccaccatgcctggtgaggccctaacattttctgtagtttaggaggacaagaagaggaactgaccctcttactcctctgtgtggaacttcctccttctgagcctcagttttgccatctctcaagtggggcaatccaactgtcagaaatgagatttttgacctcagaatacatctgcaagggtttagtagaccctagagggttttgtatcaaagtggttttcttttttttttttaactacataatagtcaatcaaagtgtttctatgagcaccaaaatgttttataaaccaagaagggtttttaattctaagtgcttggaaagcttcaccctcataaaccccaaattgtgtttttgtctcaaagtaagtgctctgcaaacttcagagtatttttcaatctatcccaaagtggttggtaaacctctccattataaactccaaaatgtttttgttgttattgtggttttgatttttggggttttttttgtttgtttttttggtttttttttttgagaatggagtcttgctctgttatccaggctggagtacagtggcacaatctcagctcactgcaacctccaactcccagactcaaatgatcctcccacctcagcctccggaatagctggaactacaggcgcggaccaccacacccagctaatttttctatttttagtagagacggggtttcgccatgtttcccaggctggtctcgaactcctgagctcaggcaatccgcccgcctctgcctcccaaagtactaggattatagacatgagccaccacacctggcccaaaatgtgattttcttcttctttttttgttttttttgagatggagtttcgctctgttgcccaggctagagtgcaatggcacaatctcagctcactgcaacctccgccactgaggttcaagtgattctccagccctagcctcccaagtagatgggactacaagtacgtgccaccacgtccagctaatttttgaatttttagtgtagacagggtttcgccatgttggccatgttggccaggctggtctcgaactcctgacctcagctgatccacctgcctcggcctcccaaagtgctgggattataggcatgagctactgcgcctggcccaaaatgtgatttttaataccaaagagctgtatgaatgctaaatgcgttgtgtatttcacctttggtaaacttttttttttttttttttggagacgaagtctcgctcgtcccccaggctggagtgcaatggtgcgatctcagctcactgcaacctccatctcccaggttcaagtgattctcctgcctcagcctcctgtgtagctgggattacaggtgactgccaccacacctgactaatttttctatttttagagagacaaggtttcatcatgttggccagactgctcttgaactcctgacctcaggtgatccaactgccttggcctcccaaggtgctgggattataggcgtgagccaccatgcctggccaggccacctttggtaaacttctacaagtgattctaattatgaagtgctttgcaaaatcagggtatttttaatcctgaaaagttttaagaaacccaaagagcttgatacatccatatgatacccacgtacacccatgcaatatcttcattttaaaaatgtttatttaaaattttattttaaaaatttcaggacaggcacagtggcttacacctataatcctagcaatttgggaggctgaggcaggaggatgacttgagcccacgagtttgagatcaccctgggcaatagagggagtcttcatctctacaaaaaaatttaaaaagtaggccaggcatgctggcttacgcctgtaatcctagcaatttgggaggccaaggcaggcagattgcctgagctcaggagttcgagaccagcctgggcaacacggtgaaaccctgtctctactaaaatacgaaaaattagccgggcatggcagcctgcacctgtagtcccagctactctggaggctgaggtaaaagaattgtttgaacccgggaggcagaggttgcagtgagccaagatcatgtcactgcactccagcctgggggacagagtgagactctgtctccaaaaaaaaaaaaaaaatcaaaaaagtagccaggtgtggtggtgtgtgctgtggttccagctacccagaagcctgaggtgggaggattgtttgagacgaggaggttgagtctaaagtgggcccagatcatgccactgcactctagcctgggcaacagagtgagactctgtctcaaaaaataaataaataaataaataaataaaatttcaagactacagaaaagttttttttaaaaaacatactttattattttggaaatggagtctccctctgtcacccagactggagtgtagtggtgccatcttggctcacagcaacctccaccttctaggttgtggaaagtaaaaaagtttctctttaaagtttttattaaataataaatcacaagtgttagaaataatatttttaattaactttttttaagcctctttgctttgtgttagtaactcttttttaaaccatatcttatgtagttgttagatataaggaaataagtaccttctgtgtccttgtacgttaaccaagatatttggtctcgacgtgctcaagcatgtcccagctcacagcttatgccctttccttatttggaaatgttattacttctccaagtcttttggcaagcaacttcctcttttcctttgttctccattgcctttacctatttaagaaagttttttaagttgttagccaattgggtttagcttagactgtgaggtccagctccaaccaatggagacaggacacagcagtaaggacccaatgcataagggataaatattcctgcctttctttgttcattgtgctctcctggcaggattgctgatgggcagcaccctttctacagaaagtaaaattgccttgctgagaaaactttttgtctgaatgctaatttttccttgcgacaccaagaaacaagcattttgattctaacacaggttcaagtgattctcctgcctcagcctcccaaagagcagggataacaggcacgcactacaatatccagctaatttttttttgtttgttttttgttttttgtatttttagtagcgatgaggttttg[132 bp omitted]ctgcccaccgagctactctgttcctggcttagagaaccaggagaaggggaaggggaatcacctgccacatgctggaggttggagcctgtggcaccatggcttgcctcactgcagttggtggtggcaacagaggctgcagtgtggccagagtggcttttctggctttgcccgcccagccactctgagaaaggctggaggagaaagtgaaggaggagtcacctgtggtgaggtggagtttggagcttgcagatggcacggctctgtggctcacctcctacagttgtggcggtgacagcgagggagacttcagcctgactggagtagaagggtgctcgtgaaggctagagtattgcctccaagatgcagcagtggatactcaggtttcaggagactccactgtccatggcgaatccatggtctgccagcgcagttttagagagagaatgtgccaccgcaggtgtcatcctcatgtgcaccctggcaggtagccatctgaagatttcaaggacaacctggcaggggagcagaccagcgacacttcctctgaacaggttcttgctgttcacttgacagactcagcaactcaggcaagtgttcacatggaagatatcctggaaggataccaagccagtgaaagctcagatgaaaatgccccatggctttggaaggccaatgaatgtgccaaggaaaaaggtgccatggaggatcctctggaagacctcgccaatgaaatttcagattaggacaccccactggatttgaaggccaaagaacgtgccaaggaaaaagttcccatggaggataccctggtggaagaccttggaaacgaaagctcagataaggatgcctcactggacttgaaggttgacaaacgcatgaaagaaaaagttcccacagaggataccctggtgaaagaccttgccaatgaaagctcagatgaggacgctctactggattgaaggctgatgaattcaccaaggaaaagttcccacggaggataccctggtggaagaccttgccaacaaaagctcagatggggatgttttgctaaatttaaaggctgacaaatgagccaaggaaaaagttcccatggaggataccctggtggaagacctcaccaacgaaagctcacatgaggatgctccactggatctgaatgccgacaaatgtgccaaggaaaaagttcccatagataatccagtgaaagaatttgccaacaacatcaaggaaaaggaggccccatgtaatgtgaaggcaccctagggagtccaggtaaatgatttcaaggatgacctggcggggatggtgatcagtgaaaagtccccagaagcagccctatctcttcacagggcaaaatgagatgccaagaaaaaagattgcttcgccattcttgtagcagagcttcctgaagagatgtcctcagggcaagtgctggccgttgtcaccgtgaaaggcatcaagaaaaatggtggctctgaggacagcttttctaaaaccagtaatgacaaagactcttcctgtagtggagacactcaagcttctggagcagatatggaagagtccaatcatgcagatgaccatcagcatatgccaacaagtactctcccagcacctgcagaaaaaacaatagagacaaagcctgaaaaggcagaagaaatgtaacccagtgagttcaaggaggatgaggatgctgaagagcctgacctgacctgttgtgacctttgttttttatgctagaagtccctacagattttttgaacacctggaagggccgggtcacaagacctcaccctggcccagcaaccatctggaccgtgagagttttggggattttgctactctctctggacttttacattctcttaattttttaaaaaatattctttctttaacctgttttaagatgcaagctgtcattgcgtcatcatagttacattttattactcaaataatttttcaattgttttactagttttttttggatctttgtccactggttttagagtttttgtaattttgataaatgatcttttatgctttgtatcattttcttaatgacttaccttagtttttaacaaatccatggtacagtaagttatattaagacatagtatttttatgtttttttaaattatactttgggttctggggtacatgtgcagacatgcagttttgttgcataggtgcatgtaccatggtggtttgctgtacccatcagcccgtcacctgcattgggtgtttctcctgatgctatccctcccctgaccccccaccccccaccgacaggtcctggtgtgtgatgtttcccttcctgtgtccatgtgttctcattgttcagctcccacttgagtgataacatgcagtattttgttttctactcttgtgttggtttgctgagaatgatggtttccagcttcatccatgtccctgcaaaggacattaactcatccttttctgtggccgaatagtattccatggtgtatatgtgccatgttttctttatctagtctatcactgatggacaattgggttggttccaattctttgctattgtgaatagtgccataataaacatgcatgtgcctgtgtctttatggtaaaaaaaaatagtataataaatatccctatagtctcttttccataaaccaaaatttcttaaggttggcatcattggcatgtggggctggataatctttattgtgggagctgccctgtgcactgtaggatatttgataacatccctgggctctatccactagagagaagttgcctcctgccaggcacagtggctcatacccgtagtcccagcactttgggaggcagagacgggcggatcatgaggtcaggagttcgagaccagcctggctaacgtagcgaaaccccgtctactaaaaatacaaaatatggggccaggcacagtggctcacacctgtaatcccagcactttgggagaccgaggcaggcagatcatgagatcaggatatcaagaccatcctggctaatgcggtgaaatcccgtctctagtaaaaatacaaaaaaattagccaggcatggtggcaggcgcctgtagtcccagctactcagaaggctgaggca[225 bp omitted]accccgtctctactaaaaatacaaaattagccgggcatggtggcacatgtctgtaatcccagctactcaggaggctgaagcaggaaaatcgtttgaacccagaaggtggaggtcgcggtgagcgaagatagcaccattgcactacagcctgggcaa[138 bp omitted]atggtgaaaccccgtctctactaaaaatgcaaaaattagctggcatggtgccatgcccctgtaatcccagctactctggaggctgtggtgggagaatcgcttgaacccaggaggcagaggctgcagtgagccgagattgtgccactgcactccagcctgggctacagagtgagactccatctcaaaaaaaaaaaaaaaagaacacagtcatgttggattagggcccaacctaatgacctcatcttcaccaattatatcttcaatgaccctagttccaaataaggccacattctgaggtattacaggttagaatttcaaaatatgaatttggggaggaaacaatatggttgtttgttcgtttgttttttaagcctgggtcttgctctgttgcccaggctagagtgcaatggcacaatcttgactcactgcagcctctgcctcccaggttcaagtgattctcctgccttagcctcccaagtagctgggattacatgagcgcgccagcacgcccagctaattttcatatttttagtagagacaggattttgtcatgctgtccaggatggtctcaaactcctgacctcaagtgatctgcccacctcagcctcgcaaagtgctggattacacacatgagccaccgcgtccagccaggaggaaacaatttaacacataacaatctcctgcgcggcttctcagacctcatcttactaaaaggcagactgattcagcaggtctgagtggggtgggacctattaatttgcatacctaacaacagcagcccaccctttgaattgcaaggaccaaacagacactcagtccatattcaaactttctccctcaactcaaagctgtccttgaaagctttattttttttttttcccttgagatggagtctcgctctgtcacccaggctggagtgcagtggtgcgatctcggctcactgcaagctccgcctcctgggttcatgccaatctcctgcctcagcctcccgagtagctgggactacaggcgcccgcaacca[138 bp omitted]cctggccccttgaaagcttttgattcaggatcaatgaaggatcacacattgcatttatggtcatgagtcttcggtaaacccaagagcttttagtcctaaagtgctttgtacatttcaaactgctatcctctaaacctcagagaggatttaatcctaaagtgctctagaatcccaacaggcattataatccctgaagtgctctattacctcccttttgaaagcccccaaacaaattttccaatcccaaagcattctgtaaacctcagagtatttttaatccttaagtgtaaacccaagtgctttgtaaacctcaaacagggcttttgaacccacaaagcatcctgtcatctgcaaagtgggctgaataggtcagtggggactgaccatcctggggtgctgtttggagtatgagagggtctccttgttcttcctccccaggtacccaggatggaggagaaggaggccctggtacccatccagaaggccacggacagcttccacacagaactccatccccgggtggccttctggatcattaagctgccacggcggaggtcccaccaggatgccctggagggcggccactggctcagcgagaagcgacaccgcctgcaggccatccgggatggactccgcaaggggacccacaaggacgtcctagaagaggggaccgagagctcctcccactccaggctgtccccccgaaagacccacttactgtacatcctcaggccctctcggcagctgtaggggtggggaccggggagcacctgcctgtagcccccatcagaccctgccccaagcaccatatggaaataaagttctttcttacatctaacaacaccatctcctttcactatttatccccaaccgcctgccaaccaggccatggcaaaggcccccagtcccagctctgagcatgagagctggctgtgctagctcttgcctaagtctcccaggcttggttttctcattcaggcattgtctgtgctgtagccccatctgtccactcagcacccaaccctgtcacctccagccctgtctgcactcccaactctcagctatttttttttgctttttttttttttttgagaacagggtcccactctgttacccaggctggagtgcagtggcacaatcacagctcactgcagccttgacctcccaggctcaggtgatcctctcacctcagcctccccagtagctgggaccacaggtgtgcgccaccacgcccagctaattgttgtattatttaacatagggatctccctgtgttgctcagggtggtcttgaactcctgggctcaagcgatcctcccacctcagcctctcaaagtgctgggattacaggcttgagccactgtgcccggcccccaactctttcactccagtcctctctacttggcccccgtactgttactgccataaaaatgggcacaaacttggcaacttaaaacaacacaaatgcattatttcacatatcatcctggtcagaaatccaggatggctccgctggccctcagctctgggtttcacagggtgtcagccacccgagctctcattgggaggctctgggaagaagctgctttcaagctcattcagattttaagcagaatcgagttcctgggcttgtgggactgaggtccccacgttcttgctggctgtcagctgggggccacccatgcttccacgcttagctccaagaggcctctctccagttactgcaggtggacctgacatcccagagccacagcccagtatcatggcgggactctgacttccccttgtgtcccatctctggtatgccttcctcttctggcagagacagtcctctgctttgaagggctcatgtgattggactggacctaccgggacaacatatttacagttttcaggaattatggggtgatcatctttgggggaccactatccagccccactcaggtccttcccatgtcatctccagcctcgactctgtggtgtccacacccacctatccttgtcttcatcttctcattctctcactaccccctgacggagagactccatctccaacttgctatttctctctctttgtccctctatctgaccctccctgctcaccacctcaaactccctcacttccaggcctgatgccacgtccaaacttggaagctcacagagcttgcctgtggtggtctgtccactttgtccttcctcagagcatttcctgtcccctctgagaatcctccgtcatgacccatcaaggagaaagctgatctgatcctccccagtgctgagtcccatctaggacccggacacggcatgtactctctcccttgaagcccaagctgagcgctggatcaccccatagactcacacactcaggaacccaacagtgagtacaatgaatacaagtcaacttttttttttttttttgagaccgtctcgctctgtcgtccaggctggagtgcagtggcatgatctcagctcactgcagtctctgccaccacccaagttcaagtgattctcatgcctcagcctcccaagtagctgggactacaggtgctcaccaccacgcccagctaatttttgtatttttaatagagatggggttttaccattttggccaggctagtttcaaactcccaacctcgggtgatctgcccgcctcagcctctcaaagtgctgggattacaggcatgagccaccacgcccggccaagtttggctgcttctaaggcctctctccttggcttgaggatggctgctttctcactgtatcctcacattgtgtctttttgttttttttgtttttgagacagagtctcacactctgtcgcccaggctggatggagtgcagtggcgtgatctccaccttccaagttcaagagattcttctgtctcagcctcccaagtagctgggactacatgcacgcgctgtcatgcctggctaatttttgtattttttagtagcgacagggtttcaccatattggccaggctggtcttgaactcctaacctcgtgatccacccacctcggcctcccaaagtgctgggatgacaggcgtgagccactgcacccggcccacattggcttttatttgcaattctagaatagggcagtacctcattctataaagtaaaatgagtgttcccatgagccgagcagagaagggttgtttacgatctcggctcactgcaatctctacctcccgggttcaagcgattctcctgcctcagcctcccgagtagctgggattaaaggctcctgctgccacacccagctaatttttgtattttttgtagagacggggtttcaccatgttggccaggtggtcttgaactactgacctcaagtgatccgcctacctcagcctcccaaagttctgggattacaggcgtgagccaccgcacccagctaatttttgtatttttagtagtgacagggtttcatcatg[133 bp omitted]tattacagaacaattattatctgtcatcaaactatcctttcagattcattttgaatacctcctttcttttttatttttctttgagatgggagtctcgctccgtcgcccaggttggagtgcagtggcgccacctcggctcactgcaatctttgcctcccgggttcaagtgattctcctgcctcagcctcctgactcactgggactacaggtgcctgccaccatgcccggctaattttttgtatttttagtagagacaaggttt[132 bp omitted]gtggccaggtgtggtggctcacgcctgtaccccagcactttagaaggctgacgcaggtggatcacctgaggtcaggtgttcaagactagcctggccaacacagtgaaaccacgtctctactaaaaatataaaaaattagccgggcatggcggtgggtgcctgtaatcccagctactcgggaggctgaggcagaagaattgcttgaacccaggaggcgaaggttgcagtgagccgagatcacaccactgcactccagcctgggcgacagagcaagactccgtctctaaaaacaaacaaaaaaacaaacaaagttactttacttgtaaaggttaaaacagaggggacttcctcatcatgctagctagaagatgtggctattatctctctctcctgtctcccctaaattctcagaggtcatataacttagtttcagcttgctgacatggaactgtaacatgagtgactccactggtctcttgggcctagtgcaggagctcggtccaaaccaatggcttcctgtaaaatttatttaacaaggcaaatctacagagacagaaagcagattcatggttatgtggggcttcacggaaaggaaggttgagttaggaataatggctaagagatgtagggctttgttttggagtgatgaaaatgttctaaaattaattgtgatgattgtagaactctgtgagtacactgaaaaccactgaattatacactttaaatgggtaaattatgtggtgtgtggatgataactcaataaagctgttaaaacaattagttaattaataattctattaaacagtttaccctgaacaactcagggcttaggggactaaccccctgtgaggtaaaaaatctgaagatcaattttgactccccaaaaacttaatgactaatagcatgctattgaccagaagctttacataaacagtagatgaacacatatattttatgatatatgtttttggggattttttttttttttgatacaggatcttgccctgtcacccagggtggagtgcagtggcacaatcatagctcactccaggctcgacccccctggttcaagcgatcccccctcctcagcctcccaggtaggcaggaccacagataaggctctcacaaccacacctggctaatttttgtatttttagtagagatgagggtttcaccatgttacccaggggtgtctccaattcctaggctcaagcgatcagcccaccttggcctcccaaagttctgggtttacaggcgtgagccaccatgcctggctgtgttatatgtattatatactatattcaaacaataaagtgagctagagaaaagaaaatgttattaaggaaatcagaggaagttaggagagggttaaaaaaaataaaatcgccgggcacggtggctcatgcctgtaaccccagcacttttagaggctgaggcgggaggaccacctgaggtcaggactttgagaccagcctgaccaacatagtgaaaccccatctccactaaaaatacaaaagttagctgggcatggtggtgcatgcctgtaatcccagctacgtgggattgttcaaggatgaactgtataagtcacaatggatctgcttctctgagcaaaccctaaaggataaagcattattcagcttgttgcagtctgccaatctaaaaagggtagtttcctgttgctttaattggaatgtttctggttactgatcttttgagctccttatcacatatttgttagttttttggatttccccttctgtaaattgcctgcttttctgtaaattcttggtcatttttttctgttgggttgttatctttttctttttgatttgtaggagttccttcaatcacctaccttttaatcccttgtcaattttatttttttattttatttattaattttttttgagacggagtctcactctgtcgcccaggctggagtgtagtggtgcgatctcagctcaccacaacctccacctcccagattcaagctattctcctgcctcagcatcccaagtagttgggattataggcatgctccatcacatctggctaatttttgtatttttagtacaaaaatacaaaatctcttggccaggccggtctcaaactcctgacctcaggtgatctgcctgccttggcctcccaaagtgctgggattacaggcatgagccaccacgcccagcccctggtcaattttagacaatgcaaatatcttccgctcgtccatcatctcatctctcatgatcttggcccttgggatccttgatgaatagaaacccttaatactgatgtaatcaaattaatttttttgacttatgattcatccttttgagatccctaaaagaagtcattaatactttcctacattttcttttattaactttatagttttaccttttgcatttagtgctttactagcagctggtctccactttacattattatgttatagaggaggaggggcctgaaagcctctcagtgctcaagatctttgaagacttaactgggcattagctcaattagagaggaagaaagcagtagaggatggggatggaccactatctcctgggcctcgcttcccccaagaaaatccatggacccacccacaaccactacatctcagactatttcagcatcttcctcccagtggcttcacacacctgggtgagacccccaacatctactcagttaccaggtctggtattccctgatatcatcctgattttttgactggaaaaaaagtgttaattcataagactttgggtttttttgggggggcaggggcaggcgatggagtctcactttgtcacccaggctggagtgtagtggtgtgatctcagctcactgcaacctctgcctcctgggctcaggtgatcctcccacctcagcctcctgagtagctgggaccacaagcatatgccaccatgcccggttaatttttataaattttttttgtagaaaggtggtttctccatgttacccaggctggtcttgagctcctgggctcaagcgatctgcctgcctcagcttcccaaagtcctgggattacaggcatgaaccaatgtgcccagacccccaacactattctaagcagtggggattaagcagtgaataaacaatgccccagcatcatgggatttggtgggggagagaaacaataaatatgtatcaagcaatggcaaatgctgtgaagaataaagcaacatgaggcagaaaggaaactctgaggggaccgagctcatcttagatagggtagtctctctgatatatacacagagggaggcactctgatatatacacagagactgaactggggtaatggagcaaatccggtccatggtaaatctggagaaagagactttcaggctgagggaatagcaagtgcaaaggtcctgaggttggaaatggcttggcttgatcaaaaacaaggaggccaaggtggacagagcagttattgatggagataaataggggataagatcacaaaagtagacgtagggtacaggagagcagaccatgcagggtctttggagcgtagtgaggagtttttatgttattctatttaaaatgggaagtgagctaagtgttacaattaaagaagtaacatatatgtatttactgatcaaaaagattatccggacttttgcttgtcactatgatggagtagctagtagctgactaactccccaccaaaaactataaaagctgaatacaagctaggcatgatggttcacacctgtaatcccaacactttggaaggctgaggcaggtggatcacctgaggtcaggagttcaagaccagtctggccaatatggtgaaaccttgtctctactaaaaatacaaaaattagttgggcatggtggcaggcacctgtaatcccagctactcgggagactgaggcataagagtcatttgaacacgggagatggggtttcaccatattagcaaggctgatcttgaactcctgaccttgtaatccacccgtcttggcctcccaaagtgctgggattacaggcatgagccatcgcgcccagccaaggaaattaaattctttccgagggaagataataccatccagtttttatattttaatttaaaaattaccagtcttgccaggaaacaagaccaaatgacagaaaaccaagagaaaaaacatacactagaagtatgtacccaaaggtgatccaggtattacagttctcagatacaggctttcaaataactataattaatatgttccccaaaaatagatgaaaagatggataatttcatcagagaactggaatctaaggaggagggagaatccaatataaattctagagctgaaaaataaattaattgaaataaaaattcagtagattagtcccacatcaggttagacacactggaaaacagatcaatagaaaatatctagattaaattacacagaaatagggtagaaaatacattaaaaacatatgagacatataggtcatggttaaaaggtctaatacatacatactggagtcctagaagagaggaaaaagacaatgaggaggaagcaatactaaagaactcctgggcaagaattttaaaaaactgatgaaagacatcaactcacagatccaaggtgggaggatcgcttgagcctgggaggtggaggttgcagtcagtcaagaatgtgccactgtactccagcctgcgtaacagagtgagaccctgtttccaaaaataaggcagaacgttgataattgctaaagctatgtgttaggtatatacgggttcgttatgtttactttatgtatgtttgagatttttttaatactgtataaagatatttttaagtaactgacactaaatactccaaataaaaggcacagattttctgatctacaactacatgcaacatggttgaatcttatatgacatttaacaaaagaaccagaaacaaaaatgtttctgtatggttttatttattctgaataaaaaaacaaataaagcttatctatgccattagaaattggggtaggccgggcacagtggctcatgcgtgtaatcccagcactttttgggaggctgaggtgggcagatcacctgaggtcaggagttcgagagcagcctggccaacatggtgaaacctcatctctactaaaaatacaaaaattagccagatacggtggcacatggctgtaatcccagctactcagaggctgaggcacgagaatcacttgaacccaggaggcggagtttgcagtaagacaagattgcgccactgcactccagcctgggccacagaaggagactttgtctcaaaaaaaaaaaaaaaaaaagaaagaaaaagaaaagaaattagggtaaaagttacccctaggagagtagggactggaaggagccatgaggaagaatcttggaggcaggtagtatgttgtatcttgatctcggtttagataacacagatgtgttcaatttctgaaaattcataaagcttatcacttatgatctatggactgttctatataaatattacacttcactaagagttttggtaaagtcaaaaatcagcagtcagcataaaacaaaacccaactatatgctgttacaagagacatgccttaaatataagcacacaaaaagatggaaagttacaggatgaaaaagataccctatataaacactaaccaaagaaagctggagaaatctctacatcaaagtagccattaaggcaaaaagcattgctagaagtaaaaaatgacatttcaaggtaataaaggggtcaagtcaccaggaggatataaccattctaaatctgtatgcatttaataatacagcttcaacatatataaagcaaaaatgacagaactgagagatggaaaaatccacagtcattcagtacaagaagcaaacagtgaagatattaaagatttgaacagcatgattgacaaacttgacctgacatagctgacctgcaggatacacactctgttcttttcttttttttttcttttttttttttttttgaaacagagtttcactcttgttgcccatgctggagtccagtggcacaatctcggctcattgcaacctctgcctcccaggttcaagcaattctcctgcctcagcctcctgagtagctgggaagacaggcgtgtaccaccatgcctgactaatttttttttatttttagtagagatggggtttcaccatg[137 bp omitted]ctgtctggcccaggctgtagtgcagtggcgcgatctcagctcactgtaccctccacctcctgggttcaagcaattctcctgcctcagcctcctgagtagctgggattacaggcacatgccaccacatctggctaattttgtatttttagtataaacgggctttcaccatgttggccaggctggtcttgaactcctgacctcaggtgatccacccaacttggccttccaaagtgctgggattacaggtatgagccaccacgccaagctactcttttcaaatacacatgaagcatttgctaaaatagatgaaatcgtggactataaagcaaatctcaacaaatgtcaaagaaatgaaatcatatagagtatgtttgtatgttttctgactacagtgaattaagtaggaagcaataataaaaagatagcagggggccgggcgcagtggctcacgcctgtaatctcagcactttgggaggc[137 bp omitted]ggctgaggcaggagaatcacttgaatccaggaggcagaggttgtagtgagcccagatcacgccactgcacccaacctggcgacaaagcgagactccgtctcaaaaataaataaataataaaaagatagcagggaagtcataaaatatttggaaagtaagcaatatatctctaaaaattatcactcaggtcaaattagaaaatattttgaattgataataatggaaacgtggccaggcatggtggctcatgccaataatcccagcactctgggaggctgaggcaggcagatcacttgaggtcgggagttcgagaccagcctagccaacatggagaaacccccatctctactaaagatacaaaaattagccaggtgtggtggtgcatgcctgtaatcccagctactcgggaggctgaggcaggagaatcatttgaacccaggaggcagagattgcagcgagccaagattgtgccattgcactccagcctgggtgacagatcgagactctgtctcaaaaaataataataataatagaaatgtggcataacaaatgtgtcaagtgtagctacagaagtttttagaaggcaaatgatggctctaaacgcatgtattagaagagatctttaaaaatcaaatgacctggctgggcacatgacctggcatcagcacggtggctcacgcctctaatcccagcactttaggaggccaaggcaggcggctcacccgaggtcaggagttcaagaccagtctggccaacatggtgaaaccccgactctactaaaaatacaaaaaattagccaggcatggtggggcacgcctgtaatcccagctactcagtaggttgaggcaggagaatcgcttgaactcgggaggcacaggttgcagtgagccaagaccgcaccactgcactccagcctgggtgacagtgaaactccgtctcaaaaaaaaaatcaatggcttaataacctaaaaatatcagtgacctaagcattcacctc[224 bp omitted]gaggcag[136 bp omitted]gggcttgagggcacatggctgtagtcccacctactcaggaggctgaggtgggaggattacttgagcccaggaggtggaggctgcagtgagctagggtcacattactgcactctatcctgggtgagaacctgtctcagaaagagaggaggggggaggggaggggaggaaggggagggaggaggggaggcagtggacgcggaggggaagggaggggaagggaggggaagggaggggaagggagggggaagggaggggaagggaggggagataaagggagggggaggggaagggaggtgggaggggagatgaggggaggaaagtggggggaggagaggagcagaggggaagagagggggaggggaggggaaggtacgggggaggggagatgaggggaggggagtgggggaaggggaggacaggagcagaagggaagggaggcgggaggggaggggaaggtacgggggaggggagatgaggggaggggagtgggggaaggggaggagaggagcagaggggaagggaggggggaaaagagagatggcacaaattattaatatccgtcaccacagatcttacagatattaaaaagattgggcatggtggctcatgccagtaaccccagcactttgggaggccaaggtaggaggatcatttgagggcaggagttcgagaccagcctaacataagaccgtgtttctccccctccaaaaaaagacaatattatgaactttatgcaaattatttgaaattttagataaaatggaaaaattccttgaaaaccacaacttaccaaaaccacaacttaccagaaataaaatagaacatctgaatagttgtatttttataaaagaaatagaatttgtaatttaaagtctttccacaaagaaaactctaggtccagatggctggtgacttcttccaaacacataaaaaataaataacatcaatcctacactagcactttcaaagaatagaaaaagagagaacacttctccacacattatatcagcatagccttgttaacaaaactcaacagggatctcacagaaaagaa[218 bp omitted]gaggcag[136 bp omitted]tctcagttcaattcccccttcctcagcccatttcaccaaagcctgaagcggaagagaaaaacacgagccccagcatggcgggcgcagccaccccctccttccaccaccagacaaactccgtggccacagcccacaccgccagcgcgcatgcgtgacacgcgtcggccgccggtttgcacctgcgtcttaagaggagtccgggcggggaggggcggggctcagacgctgcgcacgcgcactcgcgacccctcgcctccttttgctttttctggcgggaaaagctcacgcgcacctcccccaactcaactgccgttcgtcgttcgtggatgtccgttgtgtcccgagactaggacgtggctccaggtgcgccctgccccgcggcgaggttcccagaatggcccttcccagcccctaccgaaatcctagcgaagcccccccatattgtgggagagatacccctgcgtcagggccccccagatcctgaccacttgggag[133 bp omitted]ggggcaggagaactgcttgaacctggaaggcagaggttgcagtgagctgagatcgcgccactgcactccagcctgggtgacaagagtgagactccgtctcaaaaaaaaaaaaaaaaatcctgaccacatcccctcagatatactgaaaggagtccaccaggaaatcttatagttgacccccgaaatcctgtcagaatcgtctagaaattgtcagacttctccctcagagcctgccagaaactttccccaaaatcctattactctccccagatcagcagagccacctagactcgtgtcagagatccccagaaatcctggcaggtcccctcccaaacccagtcggacctcagattccgtcagagagcacagaagtccatcaaagacaccccagaaacggagaccccgaaatgcactcagagacccccgcagaaatcaagaccctccaaatccagccagagacccccagaaatccagtcagacccctgcagaaatcaagacccccaaaatccagccagagacccccagaaatccagagacccccgcataaatcaagacccccaaaatccagagaccccgaataaatcaagacccccaaaatccagtcagagaacccccagaaatccaatcagacccccgcagaaatcaagacccccgaaatccagccagagacccctgaaatccagtcagagacccccacagaaatcaaaatctccaaaatccagccagacactccccagaaatccagtcagagacccccccaaaatcctgtcagagcccttgaaagcccgccaaggcccacaccacccagagctcctgccagggccccatcctgcttcagtgtccccgtctcagtcccgtcagacccccgagatcaaccaacacccccggggtccctcaggactccatcccgaacccactccgtgcgccagggcccagccaaggccatcgcccccctttgcaccctgcagggtgttccagaccctggaagggcctctcttcaaagacccgtgtttccagaacggtggcagcgggctcacgtggcttggggagagcaggcactgggggagctgggtgaggacaggcgagcccaggctcgactggtggccccaaggggcgcccgtgcccgctgtgatgatagcagcgcccaggtctctctctagcccccagagtgcggccactaaggttttgggtcggcctgggtggaatggaggcaggatggggccccccaaactcctgtcactgctgcagggactgcccagagcagctgcaagtggggctggcagggatgaggaggaggtggcctgggcttgggggaccatgtacatcctgagttggaacccaggggagcagcaggtttggggccatgatgaggagagacctaggggttgcccgacggagagaaaagggacaggaagaggcaggagcttcagagactactcaatgccactctagcctgagggactggaacttagtccgggggcattagggagccatgggaggatcaggagcaggggcaagtcaggatcaaactcccatgagaagccagccggccaaatccaggctgatgtggcaagaatggcagctgcccagggctgtgtgggagccagacacggcccctcgcttcccggaagaggccacgtgaagccgaagcaggatgcaggagggcgtcccaggcagagacctgggcatgggagcggtccgcagctcagagtggctggagcatcatgtgcgatttggggtgctgaggtgggcggtcagccatgcagggccttggcgtcagggccagggtctcacccgtacccaggattcagggagccatggaagggtacttagcaggggaggggcaggtcagctctggggccctgtggggacagactggaggacaagcctggggataggaggctgggacaaaggccagggaagaggaccaggcagcctggaccggcggcaagccatgtgaagaaagggaggcagtgacctcccccacccacccactagcccctttgatgtcagccacctcgttctccagcccacacctccaatccataaaacaggtcagagcggagctgctcaggtcacagcgggggtgacaaacaggttgtgaggacccagaggtcctggggcacaggtggggctaggcaggccccgacccttggtggctgctctgaggacaccatttcctgcttctccttccaggagtgctcgggccagctggtccttttcccatccctccccatgaaggagggaggctggtagctttgccagcagctgcgccgcggcaggggtggcccatggacctgcccgagggcccggtgggtggccccactgcggaaagtaagtggctggaaccctatttgccccggggagggtgaggagggagccatgggtgaatgggtgccaggctgtgactcggggacttgggagaggtggctgggggtggctgagcctttgcatgggtgcagagtggaagggagggaagggactctggtagattaagtgcctactctatgcccgcccacctgtcactaccccttatctcctgtggggaggctggactgtgtgagagcgcaagcagccgcaccccttactccattcagatcgcggcccagatggcacttcttactttatgtaaagcagctgccctgtgacactctctcccctgccccgcttcatttctcttcacagtgctcacatctgtatgtcatgttttgtctctgtctcccctgctagagcatgagctccacaaggcagcgtctgttttattcactctggtattcccagtccctagagcagcgctgtcctgtggaagtataatatgagccacataggtaatttattattttttaaaagaaaaaaggaacaggtgaaatgaatgttgataatggattttccttatatagccagactaataccctgtatattatatatgtatacaggatatacatacatagagatatatatatgtatatagccaatatatagccaatataaaaaatgtatccagataatctgtttttttcatactaagccctaaagatctagcgtgtactttacactaacagagcatttcagtctacactcgcctcagttcaggtgctccagaaggagagactgccctgttggctgggaccccagagcaactcctgactcactgtgggagctcacttactgttgagtgaacggacggatgtaggttgaacgggtgtgaaagctggcttcagagggtggggaggaggcactggggttgcctctctgaaactcatctgccaagtgagagagcccagtctgatggggatggtagggcccctttcttagaggctcccaggcatccacggcacagcctgcgtctttttctacaaagccccagacctcaggaggctttccagataggagggtcagaggtagacaccagggtgtgggaaccagaggacaggctgtctagtgacagccatctaaacttcacctgcaccagcagagggcgtgcagccaccaggatccgggtggcaagggctgagacagcttcgagaggctctggaaggaaaggtaggaacacacccagaaggagagatggagacagaggaaggcaaagggaaaaagaaacagcagaggaaggaaagagaagacttagggaatggagagtctctgagatatgggaagggaagcacagagactgagatacagggaagaaaacggggacaagcgacatggaggcagagagacaggacgtggggaagagagactgggagaaagatagagagaaagagccaaagagaaatgtaacgaagaggcaaggacagagacatagaggagatagagacactgaggaaggagatcttcctgaggaacagaaatgacatctccctgggggaatcctgggatgcgacttcagacacatgctgatcctcagagccagcacgacctgatgccagtcctgagttctattcccagcttagctctctctggcaagcagccctgggtgaaccatctcattgggcctcagggtcctcgttcatgtaacatgagaaagacactgagagggctgggtatggtggctcacacctgtaatcccagcactttgcgaggccaaggtgggcggatcacttgaggtcaggagttcgagaccagccttgccaacagggtgaaaccccatctctactaaaaatacaaaaattagctgggcctggtagcaggcacctgtaatcccagctactcgggaggctgacgcaggagaattgcttgaaccttggaggcagaagttgcagtgagcggagatcacgctactgcactccagcctgggtgacacagcgagactccatctcaaaaaaaaaaaaaacagtgagaggaggaaaacagactggggctaaagccctggtctccccctaactgtgagtccacacgccccttcccaagggccaaacctaggagcataggttcaagacagagggggtgcaaatttcactcactgcagagaatcctggaagagttagagggatgagaaagttgactcatatgttaaacagggtgacctttggcgagttcttagtttctctatgccttagtcccctcatttgtaaagtagggattataatagcatcgattattattatgctagtagacagttcatgtaaagtgctcagaaaaggcctggcacctactaaatgctcaataagtgttcaattctattcttgagtccccaccacgtgccaggccttctgccaaagcctttctagattgtatctcattttctctctaggaaagaggtaacaccaaccccattttccagaggaagaaactgaggcccaagagaagttgagtccattgccccaggtgccaccacttgtctgaggccaagcctcggttgccccctggatctaccccgtcctgcagcctgtgctcagtgagctgctgcacccagctgttcaaggccagggcagggagcctagaagttcacttccagccctgggagagaggctgggccagcccagtggctcctgcagttgaggatctcttcctatgtcatggagcatttgttgagcacctgccatctgcaggtgttgtggctacaacagtagacaaatagaccccaggacgtgtgtgtgtgtgtgtgtgtgtgtgtgtgtgtgtgtgtacatgcgtgtgcttcacatacacagagctaactcagccctggtgaggaggatcactctacccacccccccagtagggaaaccgaggctctaacagaagagacttgcccacagatgtgcagctggactctgcacccaggtctgacacactgatccagctcataaccattccctcactgcccaccctgtctggtttaccctatcccttcatgtctcagcccctggccatgggctccaatgatgccacccttgccttagggatgcagggaggagagagacctggtccccagggtgggctgggagaccggagatgcagcaggcgggatcgatctgggctgcccatgcattattggattgttcctggctcctgggcccccccttcactctcagctcctcccagaatcctctcttctttgccctccccgaccctgtccctctctgagtccagcctgggaggctggagaggagaggaggaaagggtgatctcagagcgttcttctctgggctcctaagccaattggacacaaaaagacagcaggggggacttcctggtttgaaagatggggggaagtaactcagagaccctcacattgttgccccctcctgaagcttcctgctgttccccacccgcccgaactctcagtgctctgagtgaattccctccccgctacagagcccaggaggctgaggacctggggtcacccctcttccttccttattcttcccactggtgagctgagccctcttgtctccccagtgtacctccgggagcggcctgaggaggcaaggctgggaatgccggtcagcttggaggagcaaatactcaactccacgttcgaagcttgtgaccctcagaggacaggtggtgggggcatgaggggtgctggggaccagtgcgggcaggatggggtggaggctgggaactggggagcctcagagagaagactgggctaaggccccctcttgggggtattgtaagaacaaagtgggtgattatgggaagcttcaggaagaagaacgtggataatggggtgaaggccttttagaatgaggaaaacttgggggacgttgatggaagagggcagagttttggggtcgtgggataggggagggaggcagccaccatggtggcgtggggcatggctgatgctgtccctatgtccatcccctttggtttaccctgtgatggggggatgactgggccccatttccaggtgaaaaagtggactcagaggaggggaaagggcttgcccagtgtgtctccactgggccatggagcaggagtgccaccagcctagccagtgacatcctggtcccaagctgctgccagtccatacccatcactccccacctgccccagaccccctcactgcatgctctgtcacaggcactgtggctgtggcccaggtgctggcctacctggaggctgtgacaggccagggcccccaggatgcacgcctccaaacattggccaacagcctggaccccaatggggagggccctaaggccactgtggacttggacactttcctggttgtcatgcgtgactggattgctgcctgtcaactacatgggtgagtccccacatcttcatcctcctctgggaagtccttcctaagatctaacctcatacctgcttactggagccagcatcctttaggcccaaggacctactgtgtttggaatgaggctgtggagagaaaaatgaagagacgggattcagagggggtagatagggagtctgaggacaaaataatttggatgaggaagcagagggggtctgggagacagaaataaaatggggctggagaagggaggagtttggggctgacagaggtccctccccaacccttcaccaaacccactccttgcccctcctgcttttccatctggccacgggcacttgccatctggcctcaccctcctaccctgtggtgccagctctcacctgacccggtcccctcctcccacctgcaatccccctgcctgtggctggtgaggactgaggggcagctacagtggggcgctaagcctcatccctttgatacaggggattagagctggaagaggagaccgccttccagggagccctgacctcccggcaactgccatctggtgagattgctatatatagaatgaagcaggcaggccctgggtcagacagtgtggggacttaccacccagggcagagcaagggatagggtaggaaccagggacctttactgtagactagagctgtgagtgtggctttctaggtcctccgtcccttccttccgtgagctttgggtttcttttcttcagagggtggtttccaactcgttctcctcacaccagccctattagagaggcctacgaggccccgcctacctctgctccatcattaacatcacctctcctcactctagtccaggaattcacaggcccactggtcttgctgcccttcctcgaatgtgccccacttctgcccagcacaggtccttgctcaggctgttcccctccactccttgctccccaccctgctggactttttttttttttttttttttttttttgagataagagtttcactcctgttgcccaggctgttgtgcaatggcgcaatctcagctcaccgccacccccgcctcctgggttcaagcagttcttctgcctcagccttccgcatagctgggattacaggcatgcaccaccacgcccagctaattttgtatttttcatagagacgaggtttctccat[137 bp omitted]ccctggctagagttccttgctccccatgctcactcctagacttgtaggcctttccattggaacatccacctgcagaggaaatctgattatctagttagccactggcacctgggtttagttggctggtttgctcaccattgtatccccaggacctcacacataggaggtgctccataaaaaaagtggtcatgattacaggcgtgagcctgtaatcccagcattttagaaggccaaagtggaaagaacatttgagcccagtagtttgagaccagcctgggcaacatagtgagacaccatctctactaaaaataaaaaattagctgagtgcggtggcatgtacctgtggtcctagccgggacactgagtcaggaggatcgcttgagcctgaaaggtcaaagctgcagtgagccatgcattgcaccactgcactccagcctgggcaatagagcaggatcctgtcttttaaaaaaaaaaaaaaaaaatggtggtcatgttccatttctctagccatacaaaaaacggtggggaaggaagttctcttcaacctccttcatcaggcttgggggcccagggagggctgcaagcagaggagggactagaggccagaaggccagagaagaggctctggtgaggatccaagaggagaaagcaagggccggggcatggagacagagaggaggggtggagcagagagtcaggggcaggagggagaagtctgggctctgctggactgggggtgacagggagcaagggagccaggtccgcccagtggctgagtggtcggtgggggatctgggaaggggaaggtgaagtgctgcccagtgttgggtgtaaagaatgtggggagttagggttatctgggagatccagcctgagctcaaggtagaagacaagcaagagggctttacagtgggtataactgcagccccaaaagcccatgagattctccagagcacaggtgagggtggaggcagatggagtccaacctcagagccctggggcactttacgtttaagggttccagggaagccaacattctcttggctctctccctccaggatgcccagaagctgaggagccagccaacctggagagcttcggaggcgaagaccccagacccgagctgtacctatcctcacacccctccctgaccctcctgcccacaccctgtcccctccagcctgccgaggcccgggtagggcttgggatccttcagggaaatgaatgagggacggggctttgctgaaagttcagggagagcagaggagtctctctcctgtttatctttccccaaaagagccacatctccccaccaccagcacctacctcgacccggggaaatgagtcaggggctgtggacagtgacctgaaccccttccttgcccctagacaagccacagctgacctgctgagcagcctggaggacctggagctcagcaaccgacgtctggttggggagaatgccaaattgcagcggagcatggagacagctgaggaggggtcagcacgccttggggaggagatcttggctctgcgtaagcagcttcacaggtgggctggatgccacacccaccctccccagcgcccctgcctccgtcctccctgcagcagccggcctctatctcccatgctcgtgtctgcatcctgctctttgactctgtacctgtcctttcttttcccttttctgtttttatcttttgtgtctctctgattcttatctctcagcctctgttttggtctttttatctttcccttgagggttcagacttctctctctctcttttttttttttttgagacaggttctcactctgtcacccaggctggagtgcagtgggggtgatcacagctcactgtaccctccgcctctgggctctagcgagcctcccacctcagcttcccaagtagctgggaccacaggcccaccaccctgcttggctaattttgttttattttttatagaaatgagttctcactgtgttgcccatgctggtctcaaactcctgggctcaagccatcctcccgccttatcctcccaaagtgctgggagtacaggcctgagccactgcacccagcctagatttctctctttattctttaactctctgattcttcatgtcactcgccctttcatctctctgtgctttgtcattcttcatgtttatcgtggtctccctgttctagtcccccactctctctaggtctctttcccacttcctcagtcttttaggttaaaactgggtctctgtgcccacaccaggtctccttctcctcttttctctctgggtctctgtcctcccctctctctgggtctctgtccctgcctaccacctgggatctctctgttgctagtgtctctcagaatggatctgtctctgtgcttctctgccttcctccctctcgtatggctcatctgcccccacccgcattcagcacccagcaggccctgcagtttgccaaggccatggatgaggagctggaggacctgaagactctggccaggagcctggaggaacagaatcgcagccttctggcccaagcccggcaggcggtgggtctggcccaggggaaggaaggtgccctctctcttctttgtttcctggagtcagggcggcagagtgtgactatggagtaggaaggggcagaggtcacctggctttctccctctctccaggccctgctcaccctagactttttcaagcttacctgccatccttctcatgacaaaggagacagcaggagccatcagggcttcccagacccattcccccaggccctggttgtgttttcaggggtgggagaagggcaacatgggggcaaggaggctagaaatgaaacctttgtcctctctctggggttggtcaggaaaaggagcagcagcatctggtggctgagatggagactctgcaggaggaggtgagcggaggcccagcaccacccccaccccttccccagtccttaaggtcttcttgacaccactcccttctgcccccaacaccccagcagcctgtcttggggagacctcagaatgtcagtagtgtgggaatgtccctgaggttatatcacactgtgagaacagccgtggtttacaagagtgtgaggcatggggtcagcctacatggcttcaggctgaggccacctacataagagtggaccagtgcctcccttctctgtgcctcagttgcctcacctataaagatgaacaaaacaatggcatctgcctcagtggtttgtgtgagacttcaaccgaaggatacttgcaaagtcttgggcacaaggtaggacacataggatgtgctcactaaaagttatctagcattgtttctatattagtattttttacagtgaataaaacagccaggcacagtggctcatgcctggaatcccagcacttcgggaggcctagctgggtggacccctttagcctaggagttcgagaccatcccgggcaacatggcaaaaccttgcctctacaaaaaatagaaaaataagccaggcatggtagtgtgcacctgtagtccagccactcaggaggctgaggtggaaagactgcacgagcccgggagacagaggttgcagtgagccaagattgcatcatggcattccagcctggatgacagagcgagagcctctcaaaaaaaaaaaaaaaaaaaaaattggatttgaagtcaaccttgagttcaaatcccatctccgccacttacacaataggcaacctttaagcatgtgacttctccttctcaagcctttacttttagtttcttttttttttttttcttttttttttttttgagacagagtttcattcttgttgcccaggctggagtggaatggcgcgatcttacctcatggcaaccaccgtctcccggttcaagtgattcttctgcctcagcctcccaagtagctgggattacaggcatgtgccaccacacctggctaattttgtttttttgttggttggttggtttgtttgttttagtagagacggggtttttccatgttggtcaggctggtctcaaactcccgacctcaggtgatctgcccacctcagcctcccaaaatgctgggattacagacatgagccaccacacctgacctacttttattttcaaagaactggaagaagggtatctgttcagtaggcttgttttgaggattgacagcatttcactgagggactagcaaacaatatgaagagactgagttcagcttcacatttaattcaagccccgttccatccaagacagaaaaacatcatcttagttcattctgggcccacctaattttttttagattgaaacaaactcatcaattgacaatgaaacctgtcaccacccccgacctcaaggtggtatctaagttgcaggagactgatgcaggagcctagtgctctaggaggctgctgatcctcactcaatgtttctcctctctgctgttcatgagattgatgggttttgtccaagcgtttgtcaccactgtgtgctggcatctactgtgaggcccgcattgcctttggatctctggacataccatcttcttcatcttctggtggtgatcccttatctgggctgggactcttactccaccacttccacacccttccagagccagggaggtgatttggctactttcctgtgaaagggaagaggctggggtcactgcccaaagcccctgcctcatttccccaggccagggtgggtgctcatggtggggagatgtggcttctctggggaaagagaaacaggagagagattcctctgttctccctgagctgttagcaaagtccctgtccgtcactcatttccctgaaggatcccaaaccccacccaggccttgacagactggaggacacagggctggggtgggcagaggtctggagaggacccaccagtgaggcctctttgctttcacaagaaagtagcatctctattattctcacaccgtgatgattctgagagtgctctgggaagtacacgcaaggcctctcagatcacaagacttccagggctctgcggttctccatccataccctccacccctcatagctagccctgggttaggggaaaactctgggctcattttcagcctattctcttctctgtctgtcctgcattcctcccccagctctaaggatctctgcctagtccagacagatcatgtattcccaaaaaatatctttgtcctacatgtgcagtgttttttacactgaaatccaaaatctttctgctattttctggctcttccatgaaaactcacccccttggggcaatgggaatctcacagcaggatggctgtaccatgtgagacatggaatgcagcaggatgtgac[141 bp omitted]tgaagccccatctctactaaaaataaaaaaatcagccgggtgtggtggcacacacctgtaatcccagctactcgggaggctgaggcaggagaatcgcttgaacccaggaggcagaggttgcagtgagccaagatggtaccagtgtactccagtctgggcgacagagcaagactcagtctcaaaaaaaaaaggaaaagaaaaactttccggctgggcatggtggctcacacctgtaatcccaacactttgggaggccaaagcaagattgcctaggccaggagttcgagaccaacctaggcaacatagtgagagcccgtctctataaaacaaaaaaaaacaaaaaaagtaaataaaagaatgaaaggccaggcacagtggctcacgcttgtaatcccagcatcttgggaggccgagatgggtggatcatttgaggtcaggagttcgaaaccagcctgaccaacatggtgaaaccccacctctactaaaaatataaaaattagccaggcgtggtggcaggcgtctgtaatcccagctacttgagaggctgaggcaggagaatcacttgaacccaggaggcagaggttgcagcgagctgagattgtgccaccgcattctagcctgggtgacagagcgagactctgtctcaaaaaaaatttttaaaaatgaaaaactttccctgaagccccctggcagaacttcctgccttacagttcattgccattcagccattataaccagactacatggataatatggccactaatgggtccagaacgctccagggaagagaacaaagaaatgatgacttcaatctacacgacattcatttccttaaccagaggtttagaagaaggtggtctctgggaagaaggtggtctctgggaagaaggtggtctctgggaggtttggtggctccctggctgcctgtggcctcattattgcagatgactgcaacagcttcaatctcatgttctcattcaaagtaggaaaacgtggggcaaaggggagccatgaggctgggcgcggtggctcacacctgtaatcccagcactgtgggaggccgaggcgggcagatcacaaggtcaggagatcgagactatcctggctaacatggtgaaacccccgtctctactaaaaatacaaaaaataaataaataaataattagttgggcatggcggcgggccgctatagtcccagctactctggaggctgaggcaggagaatgtcgtgaacccaggaggcggagcttgcagtgagccgagattgtgccactgcactcagcttgggcgacagagcaagactctgtctcaaaataaaaaaaaagggggggggcagccaggaaatgcccctctcgtggctcctttcatcagaagcctctcaccccacccccagcagctcttacatctcactggccagaactggctgacataacgcccccagctgcaaaggagcccaggagaatatgtgacctttttcagcctctagagtggcaggtgaacaagtgagaaggggtgagaatggctgctggcttagctaaccagctgagcttcctgcatctgccaagatttccaccttgactcactcccatggctggggctgggacccatctgccctcagacagagagagtagatccctcgacaaaagcagaaggagtaagcagggtaaatagcaaccagcagtctcatctctacctcctccccaccaggaaggcctgctgccaggttgagtgccttgagcagcatctgggacaccctcggccctcgataaactggagctattcttggttccctcccctctaccttccccctccacacagctgcctacagagcatctatagattgagttctcaagttacagtagaataatgctggagtaacaagacactcagacactgaagatccaggcagccttcctgtggagaacctacagagctgtctcaggttactgcagaaggaggcaggagcagctgagtaaccaggttccctgccgagtggcccaggatctggcctgcaaatccctaccaggtggacagatgttgagacagcactcctttcccgtccttcctctgcccttcacctggcagcccaggcccactgagacagagggagagcagctgatggaggacttggagctggctggagggagggagaggctggccttggtgtatcccctggagtgccaagaggaggggcgtggtgaaagggaactctggactgcctccatgccccaaagtgcatttccccagtgaccacctcgctttgaaaccctgtgcaacttgataggtttttggtgcccctaaactttagactggaatctgggccattttatgttcaggtcccatttcatggctggcatgggctgccctctccggcctattgttttcccagctaactgccctcagccttgaagactcagcaacgcctcctcaggaagcctgttagtgctcccatggtacccaggctgtaggcctcaccagagcccacctcgtgcattgttacccgcttctgcatccatcgccacctctagagcctaattccctttgtgtcccattctcacccagggctgtgtctggctcacatgagagtctgaggattataaacagaatttggaatcacacagatttaggtttgagtccatttaccatgtgaccttgccaagtctcttagcctctctactcctttataaaattggaaatgattatactattaatagggcaaccagacttggcattactcctgaatggcacaatttgatatgtatagcaccacccaatcttgccaagaaattgaacaacagtctggacaaggccctggatctacctaccagtttataagaaataatgatagaggaaagtggtgaacataaccacagggaacaagagcgcaatcagcctaatctgaacgcaccaatcctacaggacaagggacctgctttcttccacagaatgagggcctgaagagtaccagggtcggggtggagggggcagaaattactgtcagattaaaagaagtaagacatttcaaccaaaagcaatgatggaccttgtttggaccctcaatcaaagtaaatgtaaagaaatctctgagacaaccaaaatgaaaaaggagcacaggcccggtgcagtggctcacccctgtaatcccagcactttgggagacc[135 bp omitted]gaggcaggagaatcgcttgaacctggaaggcggaggttgcagtgagccgagatcacgccattgcactccagcctgggcaacaagagtgaaactcctctcaaaaaaaaaaaaaaaaaagaaagaaaaaggagcacaaactttctagtatgagatgatactgagttattgttaattttgttaagtatgatagtggtattgtggttttgctaaaggaaataagtcctcaagtaggagataaatgctggagtaactacaggtgaactaatatgatgcctgcaatttgctttaaagtaatctacttaaaacatctggaggagagccgggtgcggtggctcacacctgtagtcccagcactttgggaggtggag[131 bp omitted]gaggcaggagaataacttgaacccgggaggcagaggttgcagtgaaccaagatcatgccattgcattccagcctgggcaacatgagggaaactccgtctcaaaaaaaaaaaaaaaaaaaaaattagctgggtgttgtggcaggtggctgtaatcccagctactagggaggctgaggcaagagaatcacttgaacccagaaggcaaagattgcagtgaaccaagatcgcaccattgcatgccagcctgggcaacaaaagcaaaactctggctcaaaaaaaaaaaaaaaaaatctggaggagaaacatctcagtttaaacaaaaccgagaaaatgcatataattattgaagctgggtgatagataatgtggataacaggctgcttatattgttcttttgattttaaaattggggataagaaatgagtcaacacatgcaaaatgctcagtaagtgttagcgattattaacctatctaatctttacagcaatcccataa[135 bp omitted]ctgcctcagcctcctgagtagctgggattacaggcacgcactaccatgcccagctaatttttttatttttagtagagacggggtttcacca[136 bp omitted]aattaaagctgtggtcccactggaatggttggaggaattaaatgggttaaaacatatgaagtgcttagcatgaggcctgatgtatatcaatcaagtgtttagcaaatatctgctgttaattttgacattaccacttgctggaatgaacgtgaccagccattccttcttctagaacgggaagctgcttgccgagcgggatggagtgaaaaagagaagtcaggagctggccatggagaaggacactttgaaggtgccactccttcctagtgcctgacaactttccaccaccccggggccatttttcccatttccggttttagtgactgcagcctgataagggcagggtcttccatcaagctgtcaggctcccaggaccacccaggcatccctaaaatccctgaagtcctggaacatctcaggaggctgaatacgtgggggtgcgagagaacaggtggggccaggtggagggcaggaccaaggggagtcctgggaggctggatggatggaccggctcctttcttggcagcggcagctctttgagtgtgaacacctcatttgccaaagagacaccatcctctctgaggtaaggggccccgggagggaaagagattcgctttccatgtgcaccagccacttcctgcccctggtctagaaagggaagtcctacttgggtctgatccttggatgtgcagctggagagactggagggtttccccaggtcccaagtgtgacccctcagggatctagaagcccttctgcccggtgctctcccttgtgccccagctcttccctcaagctcaccctgtcccttaaccccccagccagtccccccgccaccaccacccccagtgtctttggggaactggtcccagtctcatttggctttcggctttcctagcgcactcgcgatgtggagagcctggcccagaccctggaagaatacagagtgacgacgcaggtaactcagcggccctcgccacccaccgcggccctcgccacttctcttttgccatctctgggacttgctgcctctcctcctcgtgcctctttgtcagtggccacatcttgcttcttccatccttgatgtatgactgtatgactgcatgtctccccctctgtttctgtatctgccttttcactttttctctgttccttccattcactttcattctctgtgggtgtcttctcacacacctcctctccttatcttattttttttttgagacggagtcttgctctgtcgctaggctggagtgcagtggcacaatctcggctcactgcaacctctgcctcccaggttcaagcgattgtcctgcctcagcttcccaaatagctgggactacaggtgcatgccagcatgcccagctaatttttgtgtttttagtagagacggggtttcaccatgttggccaggatggtcttgatctcttgacctcgtaatccacccctcttggcctcccaaagtgctgggattacagacgtgagccaccacacccagcctcccctccttatctttatgtgtctctgcgaggctcgtgtgggttcctgtctctgcctctaggtctaggctgtctgtctccctaggcaagtcttctctgtttggctctggtctttaccagtctcttagccctcatgtttctcttgcctgtctgtgagtctgtttccatctatgtctcattttttcatgcatctctgcctctgccttccttcttttaattgtcttggctgtgctttttttttttctttcttttttgagatggagtctggctgtgtcacccaggctggagtgcagtggtgcaatctcggctcactgcaacctccacctcctgggttcaagcgattctcctgcctcagcctcccaagtagctgggactacaagcgtgtgccaccatgcccggctaattttttgtatttttagtagagacatggtttcaccctgtcagccaggatggtctcgatctcctgaccttgtgatctgcccgcctgggcctcctgaagtgctgggattacaggcatgagccactgcgcctggcctcttggcctgtgctttagcttctggattcctgttgctctctctctttggcttcctaacattctgtcatggctttcttccccttgtccctaggcagtatgtgtctggggagcccaaagtagtcaggaaaggggaaagaaccctggaagaggagcccagaggtggatgggagggtgggaaaaatgcagagccaaatgtgctccccacttcctcctttgcaggaactgaggctggagatttcacgcctggaggagcagctgagtcagacctatgaggggcccgatgagtgagtggaatttcaaggggtaggaggaggcaggaggggagcctaagggcagggacaccctggcctccagccccaaggtgggcagggaagggaggccagcatgagctgactgagtggccaccaggcacagaggccatcttcctccctccttcctgtgtggccaggctacctgaaggggcccagctgagaagagtgggctggaccgagctgctacccccatcgctgggcttggagatcgaggccattcgacaggtgggcctaacacccctggaataagctgcaggccaccaaggcagaatctccaaacatctccctactctgatcctcacaccagcctagccctaacccacattgctgccagaggctcctatcgcaaccttagcttttctctaactctctctacctcggatcctaaccccaaacccactgccagacccaggcctgtgccagaccccagtctgatccagctttgactcacccctatctcgtctccctccatgaccatctcactccttaacttcatctcgaacctagaccttggtcctggcaccaaatcctcccctgttcctgcttctgcccactccccaaccccagccccacaccagcccttttctatctctcatcctattttcagccgcacacctaaacctatttctatctctgaccttgttttctaccttaatatggctctccctgacctcggaaacaacttctgtcccagaaacaggaagtggcaactgctgatctctccaaccctctgtgtggggtgtggcagtgggaggaagtcatccatgagaccagtgaggaaactgagtttccatctgaagccccagctgggggacaggtgagcacaggaaaagctctgaagtccaggagctggaaaggggccaggagctccaggtgccgccctggccagcccattcactcacacttttgcttgttccccatttgatgagaaaatgttaattgagggcccagtgtgtgctggacacccagccacaagccagaccagacaccacccctaccccagggactgacctgccagcgttgtagacaaaggtgaaccaagcaaacacacaagttgcactgtggcttttattgttggtttgttttttagaaaacactcttgggaattacattatttaaaatcgtactactgtaggaagggaataagtaagttgtttattccagcattttaaggatatattaagcatttatgtttcaaatgttagcacctttaagaaaagccagcaagctcactatgacatctttaactcagcaataaccattggggttttttttgttttttgtttttagagacaggatcttgtcttattctgttgccaaggctggagtgaacttgactcactgcagcctcaatctcctggataagcaatcctcccacctcagcctcccaagtagctgggattacaggaacacaccaccatgactggctttttttttttttttgagatggagtctcactctgtcacccaggctggagtgcagtggcacgatctcagctcactgcaacctccacctcccaggttcaagcagttctccctgcctcagcctcccaagcagctgggattacaggaacctgctgccacacctggctaatttttgtattttttttagtagagacggggtttcgccatgttggccaggctggtcttgaactcctgatcttaggtgatctgcccgcctcggcctccgaaagtgctgggattacaggcatgagccaccatgcccagcctttttaaaatttttttatagagttgagatctcactgtgttgtccagactggtctcaaactcctgggctcaaactgtcctcctacctcagcctcccaaagtgctgggattacaagcatgagccactgcacctggcttttttttttttaattaattaatttattttgagacggtctcactcgcttctctgttgccccggctggggtgcagtggcattatcacagctcactgcagcctcaatctccctggactcaggtgatcctcccatctcagcctcccaagtagctgcaaccacaggcatgtgccaccatgtgtagctaaattttctattttttgtagaaatgaggtctccctgtgttgcccagtctggctgaactcctggggtcaagtgatccgcctacctcagtctcctagagtgctgggattacaggcatgagccactgctctgggctctctctctattttttttttttcttttaaagaaaatgttgtaaacagctctataaacaagctgtattgtcttgagaactgcaccacttcaaagctctttgccatccttaaggagagactcatttctctgatcactttttccctggtttgagaaaagcttttgtttctctttgacaccagagcttgtttgggttctcatttaactctcccagtatctctgtaaggcaggcatcctcatcttgttactcatgggaaactgaggctcagggagaaatcacatgccaatggtcacacagcttgttggggacagagcctcatccctcagaagtgtaggttagattgggcttctgctttgagctgtcagatgcccctgagagacaggcttgtcaaggggaagactgagccaggcctcagagtgcaacctgcgatgggcccagggatacagagctgagtcccttggggccgggcctctcagtgctcaaggcctgataggagagaccctgcaaatgggttgccccagtgcagaatgatcattgtgctagaggtgggggatgggcctgtgggagcccagagaaggggtatctgtgtcaggtcagagattggggaagatattgaaggaaaactgatacttgagtggaaggaaggaaggaaggaaggatggaaggagggagggagggaaggagggaaggaaggaaggaaggaaggaaggaaggaaggaaggaaggaaggaaggaaggaaagaaggaagccagcctttgaggcactagcacagcctgtgcaaggccttggcataaaatcacgatatgcttgaggagtagagggtaactaggggtgactagtgagagatgaggccagggccagatcatgaaaggaaatctctgacaagctaacagattgtacttttcttcataaagccacaagaagggtggggtcagctccgggcttaaaaagatccctctggaaccatgtgagggacctactggaggcagggaggaggctggagcaatggtgatgaagcctgagccaggccagggccctagggatggaggaaaagggacagacagacataattggggtggagggacagagcaggggtcagacgggatgtgggtgatggggagggaggaaaggaggcaagacttggaacttgtgaccttgtgaggtgaaatcttgagggatgtctgggggctgcctggaagagttgggtgcaccatcctggagctcgaggattgcgtttagaaaacaatggcaagttggttgctgaggtcaagggcaatgccaatatgtctctggagaaaccgagaggtacttgggtcctgagggagagcagatagatccagcccaagtctgggaacctgggatgagaaggcggttggacagggaaatgctgatctcctctgggacccagataagtgtacgagatctgtggaacatccaggaagtttaggcaaccgggactcctgggtcctgtcagggaagggggcttggtggcatcgagaacaaccctttggtttttggcttctgcccttagggggctaatagggccatcctcatgtagggcagcacgagaggagggcaggttgtagaaggtggtgaattcatgtgtaggttgcagcctggaagaccttttgtatatggggtctgggaccggcgggggagacagtgggcactgttagggttggagctttgagtgagaagaatcagagaagaactaacctttttgtttccacagagaaacttccagggagagccagcgcaccctgaagaaggaaggaaggagccatccatgtggtaaggagctgagccatccgtctgcctcagggtgacaccttattcacagctgtttacagtaggaggactggatgtgccctgaggggatcggcattcattcattcactccttcttcatgtcttccgggagcagaacctgggcctgtaggccaggagatgaggcctggccctgccctcaggtctaggaggagatctggttcctgaccctgccttgggggagggctcccagcgaggctgccatgcctgaatggggtgagggggggcctctggaatcagcgtggattcagattccagctcaggtactttgcagtcaggctggtgtaagcatttggttgtatgccgtgaagtcccagccctgtgattgggatgtgattgttaggaggctgtgtccaggcctctgaggatggagaacgcactagatgactgggcccaccctcctccggggccctggccttcgggcctctggtttcctgtgttgcttccctctccccctcccctctttcaggctcccagctgcggctactaatgaggctgcctgccaaggcctctaattggacttgtctgggaagagctgagattgggcgggatgggagctctggagctatgacctccctctgcgtcaccagagaaaggaggggagaaggggctgagcagtagtggaagtgggggaggcaggtgccatgcgagtttccagaggtcaggggcagtttgatccgcaggttggaaagctgggagtgaggaaggtggtgaatacaacggctcctaaatgtagccagctgtgagggcttggaccttgagaggggttgggtcccaagtagaagtttcaggggatcagatagtgtatgtctgactggggcctaagagcctggatcctttatcgcgtgggagcacagctgtattcctgagggtatctctgagggttttgggtctgaagctggtggtggtggcaactgcagggctggatctctggtccccagtgaaggcagtggctggtggtatggatggctgggtctctaaggggcattcaggctgggcagcttgaggcctgagtccccaaagcagcatttcagggactcagatggctgtgaccctaggaggggcctccctaggagcctcccgccgaggcagggtcaggagccagatctcctcctagaccgagactcgctgagggaagggtcaggtctcatctcctggcctacaggcccagggtctactcccggaagatgggaatgaatgaggggcatgctaacccctcagggctcttccagtcctcctggaagagggtcttgcacctaagaggattcggcatggggaagagctccaacagttgagttctgtgggctgggaggtctgagttggagtcccagtcctcagagagcacccagtgacagtcattgaaaaatggctcaacccactagacaggaagggggtttcgacacgtgctctggggtcttacagaggcctgaatctctggtattttggagggtgagagagccagaagcctcagttcccagctgggggatctgctggggaagtagtggctgagaaaaccaatctgagatgaagaggcccccttattcttttagtggttcacagaccctttgggtaatttggtgaaaattcctgtgaaaaatacatatgcaggacaccccccaggcccgtccgtgctgcctggcctcccccaggcccgtccgtgctgcctggcctcccccaggcccgtccgtgctgcctggcctcccccaggcccgtccgtgctgcctggcctcccccaggcccgtccgtgctgcctggcctcccccaggcccgtccgtgctgcctggcctgtgctaagaccccctgctccaaggcttctctcccagcccatagtaggcaaagggaaccagggagaagaggacgaagccagcagtgactttgttggccctcaggttgaccagaagagaggaagaggaggatgcagagagccaggtcacggtaggcagtccccagcacccctccccagtccccatccactccacacccacagaggctgagtcgtttcaactcttcccaagccccagcctcacactccaactcctcaggagcagagagaaaaatcatttggccaagagataacaaggcctttgctgtagctaatgagagcgatggtgaggtggggggaggcctggaggctagtgggcggccaggctgctcccaggggaccctcccagccacacacacagggctgcagccaccacaccgcaggcctcatagacgtggctacacccccggattgcataaatgcacacgcacatgcgcccacactcgggagaggttgggccggccctccccagccagcctcagaactccctgggggcgtagtgcccgcagcccccctgcctgcagccacacaggccagttcctctgctcctcagagcccagtgcccggtgggggttaagatttccattctcaggcaaggacggggaaagaaacttggtaaggagaggtgaggagccctcagttgtgagctgaggaatgcaggagctgggctggagtctgcctgttgtgggtcaggcactgtcagggcccctggggctcttcagggtccaaaccggccaagatggctgcctccaggacactcagctcccagcaccctggccccgaagcccacctccttcaacatactacactcccttgcagagactggggctccacctcagcttcctcacagctcacatgggcataatctcttccttgctcccagggtggggaggagggttaaggactatgtcataaagggcctgggtccctgcctggcacagcaggtggtagaggtgaagatattgattgtgattggtgttctgtttttatttactgccattatcattgtcattcatcatcctcatctgtgttaaaaaggtatgggggtaggaaagccaaagacccatagaggggaggcccttccggggagacatgggggatgaggcggtgcagtgggtggggcctggccctggaggaacagctggggctttgatctttgaatcctcagatgaagtgttggaattaatcagtgaatttagtgtggttgctgggtgaaagatcaaaataaaaaatcatatttcagtatagcaaccatgagcaattagaaaaataaatttgtaattataccatttataatggcatggtgttttgtttttggtttttgttttgagatggagtcttgctctgtcgccaggctggagtgcagtggtgcgatctcggctcactgcaagctccacctcccaggttcacaccattctcctgcctcagcctcccaagtagctgggattacaggcacgtgctaccatgcccggctaatttttgtatttttagtagagacggagtttcgccatgttggccaggttggtctccatgtcctgaccttgtgatccgcccgcttcagcctcccaaagtgccgggattacaggcatgagccactgcacctggcctgtaatggcatgtttttaattagtaaagcgcctgccgattctggcataggcaggaagacaggattcttcatgaggcccagcacaggggtgggcacctgtagaagatgtggtctctgccctcagagagcttagatacttccagaatccaatggaaaacggaggtgatgatattgaatagctcacacagacattgagcactcactatgtaccaggcgctgtccaagctattgcccccgccttttttttcctacattcactcatttagtctccatgttaaccctatgaggtggggacatccctggccagcagatggggaaagagcggcacggagaggtgtggtgacatgccaaggaccctcagccagaagctggcagaaatgggaacccgacctggcagcagaagtgcactcacttatctcctgagctccaccactttctatgtggccacttgtgtccagtgggctgacctgagcacctctcagtccagaacccggtgcctccaacgcatctcttctgtccttgcaggctgatctccctgtccctctaggagcccctcgccctggagacatcccagaaaaccctccagagaggtaataggacccacagggtccaggagggacactggggcaaggaaaaacccagtggtgattccctccttcaccccagcagacctgcgcggcgggaactccagcaagccctggtgcctgtgatgaaaaagctggtcccagtcaggaggagggcctggggccagctctgcctgcccccacagcggctcaggtgtgcccccaggcgtctccagaaggaaggaggtggtctgacattgggaagagcaggggctgcccagaccctgccctaaatgctctcccacctccccaccagagtcactcgacatccactgatcccagctcctgtcctgggcctgctgctgctgctgctgctctctgtcctgctgcttggcccgtccccacctcccacctggccccacctccagctctgctacctccagccccctccagtgtgagaggctctacttgcccctcagagcagtgtctagctcaataaatcccctggccctctctccactgggatccccattgttagtccactgttgcgcaggcttaccctagatagagtacaggggatccacatccctgtatttttatgtgaagtctcctagttttttaatgctgacatttcttaacaatagcaaaactcccccagtaatggattaagcactaaggattattccctcacaaaacaagcctggcgagggcagctgtgggcacacagctaagtctcggttgccttggggtcagggcctcagtgattctcctgtcccctccctcatgctcaggagttggcagttgtagcttcctacatcacatctgcgggaaacggaaatttcttccttcctttttataaagagaggcagtagcctcagtgtgcagtgggtagattcaaatcatattcataataaaagagaagcagttgcctgcccagagccaccagcagacttgtgtttgtttcactagccagactgtttggtgtgaccacccttaactgtaagggaggctgggagacctgggaggtcaagtacctctgcggggactgggtaccttgaaagtgccttgccacacacctcattcacactgaaaaacactgcaggccatggacctaacaaacactctgggagtcacctacacaccaccaccagtgtgcagctgctgagtggccttggcatgcatggccaagctgcttcgaagggctccaggatacctcttctccttgatttctttctccttcctaccttctctacagctctgccttgccctcccccgataggatcctgactctgtcctgccacccctccacgggtagcagcctaggttgacccagtcccaactgcatcctaagtcaataaagaacaatcttcttgggccgggcacagaatcacttgaacccgggaggcggaggttgcagtgagtggagattgtgccactgcactccagcctgggagacagagtgagactgtgtcttaaaaaaaaaaacaaaaaacaaaaaaaaaattaaaaaaacacatgcgagaccccaacccctccctcttattcacatggaccatctgcatggtgcagctctgaggcatcattatgctgtaagccccttcccagctggagtaaagctgaggacaccaaagggaagcagatggagtctgagaagcctaccctactcccgaaaagaatacatgattgggcacccactctgtgtggcatgtggcccatggtattatgcagggaatgccccaagctttgcctgcctcatagcaccgccagcaagatccttacaccatggctccaacgctccctgtaaacaacaagagtggacacccaggatggctggccccagggtgggagggcgctgagctaggcactttgagatatgtatttaatcttcacctcaacactaggaagtagatggtgctattattgctttacacatgaagacactgaagcacagagaagttaaatgacttgacctagatgtcacagctaaaaattatgagagttgggatccaaactcagtctgagtccagttcagcaaatgaactcacacggtggctgtctgctgtttgtagcagcctatgagttgaacatccttccttgcctgggaaaatcccaagataggaaggagacagggccccaccttcaaccaggagagtcaaaggagggtccccttccccagctcccagggggttgggctgctatgacaggcagtgtgtggggcccatgcccatccctgtggccaaggagaaggatcacgagattggcagccccaccagaccctccagtcacagctgtcgaaggcagcagcaactctacagaaaaaggaggacagggatgaggaccaggcacacaccagagttgtcctctagagtgcaaatggtaaacaggaaaagcaccagggtgccatttattcattcaacaaatatgtgttcatcatctctttgcaacagctagaccttagaagatgaagctgtagaggaaagcaggacctccaacatcaagctgaggagcttagattttctcctgagaatgatggggctttgggaggttttattgcttgtttgtctttggttttttacattttaattgaggcgcagcttacatacagataggcagacaaatcttaagtatcagctggataaacttttgtgtacgtatatacccatgaaaatcacagcccaggtcaagagagtagacagtttcagcaccccagatgcttccttggagagttttgagcaagggagggacagaatcggacctatttaaagacagatggaggtagctgcaggtcctgtgagagtccagaaaaggcaactgattcggcttggaggttacaggattctttccagacaagtgacatttgtgtttagtcttgaaagatgggtaaggtttgggttacagtcagcaggggcccagggagggtgtcatagaggtgggaaagagaccagtgtgtctggagagccataggcggcatcctgttgctggatttaaaaaaaaaatttttttttaaagatttggagcctgggagggattgaaggctacagagtggtgggaaataagagaggtaggcaagagcccatgaagggatttgaacaccagcttgaactttattccctagtgccggtaaaagggttgtgagcaagggaaggcagaactctgggtaggaagaagagcattcagggcctgtggaggagatgaatgaatgaaggggatgagaatggaggccagcaggtggggaggagtctggggctgtggtccaggttggagagaatgaggcctgaggcagggcatgtgggtggagaggagggaagagcagagccagggcagggtgggagggaccgggctggagactgacaagctgtgaaggatggcgaaaggggcaggacaaggacaacccctgggacctggcccagtgactagtagacagtggagccattcccaagatagggaacccatgataaggagtgagttcagagaaagactcagttcatttaggggctggagtcctgagccctgagctcccaggctggagaagggggtctgggtgttgtcagctgtgggtggtggcagaagctgtggggactgctgaatttgcttgagagtagagtggggagggaggaggctccagacaccattttgagcaaaacctcaaatgttctgatacggatcgggaagaaaatagagtgtgggaagagaccaggccagtacccagctaccaggcccgcggggaaacaggaggaggctcttcatagggtctttgtgaggttaaaagagttaatgcaagcacagcacttagaagagtgcctgctatatagcaactgctcattcacattttcattccatttctccatgagagtggcggaaaagtctagacttttgaaattgcacatacccggattccagttattcttttgtcgcttagtagctctaacaacttaggaaaattcctcctgactttcagtcttatttgtaaaattaggccaactccagatagttttgaggaatgcagtctttcctttgttattcggaaggacagaggaaacagtcccgcccccacagtccaagggccaattagggctcggtccgcctcccgaaaatgcaaattttgggacgccttgccaaacacgcgcggcggccccgcttcccgcgcagcagacgcggccggctccactctcttctttaaaccaatgagagcgcggtccgcacgaacggcgccccaggcgcgctgatctagccctctgcggaccaccgggttgccatggttaccacgaggggcggagctgaagggcaggctggacctccggggagagagacagatttcgattggctcttttctcgcttcacctgcagcccaggtatcttcccgccctttccctgtcctttttggagcctgacgcctgctcctttctcttctcctgccccagcctggcgccccgaaggtctctagagaaggagacccgaagtcagaaaaccctgaaaaaaattgctggacgctgctgtgagaagaggaaacccttttcaaataaaagcgttttgctacgtaacgggcgctgtactgaagtcttatgaagtatatcttattggatcctcgtaacagatgaagaaaaggagacacagagactgacgtcaagaaggctttctcagtactacgcagctagatttggaggaccctgggtttggatgctagggctgcctcacaccagagcccgcgatctttccactgtgcctggggagaagtctggaagtgatgggagggaggaacagcgaaattcaaagatgagagctgatggagagacagatagaaacctaacggaggaaagaaaaggaagatatgaaggagtcaggcagaggaaaaaggaaaaaagaaagtgatggagaagggaaggaagagtttcagaggcagaaggagaatagagagaggaggcagagattcccagaagaccagaaagccaaaagggtgaaaggggagataaccacaaggacccagggagacggggacacatacccagagaggaaagagacccagagaaagggacagagacggaggaggacagagaccttggagattacagagaaccagagagaaggggacagagatgggggtagggagggacaggggcccagaatgaaaggagggggcgggggggtgggggcgatagggaagcagagatccagaaataggaaagaagccagcttcctggacaaagacaggcagagagaaacggaattgaggaaagaaaatagagtggggactgaggagagagatgccagagtggccgacacagagtcctgtctcttttctaccccccatttcaagccccgcgcccccaacccaacgcacacgcaggtcgcgcaggaactaggcgcagtccggagcgcagggcatggtctttattaagatggggacgggcagcgcgctcagggcgcatccaacaccagcagcttgtgcatgtacgagttcagccagtggcggcgctcgagggcggccagcaaccgcgcgcgctcccggaaggccgcgtcgtccgccagcgccaggctcctccgcggcctgggggtggcgggatccgcccaggcccgtcctggggggcggaggctgtggagagacgcggtgaccgcgcgtccagactcgctcttgccgccgcctgtcctccccgcggtctaactcgaagccccgttactgcccagtccgtggagtggctcggtccggctccccctgtctctctcgttctctgtgtgggtctctgtctctctgctcaccaggttcgaaactccccaggtactgagaccgagtctgatgcacttgtccgcccacagcgctcagcgcatggccaggcgcacaccaagaacccaataaacgttgctcaaagaatgaatccgtttctgcaacgactcctttcgagcctctccacgcctttctcgggatctatctttctgtgtctctttcccttgctgattttctgtccatttcccgcaccaccactaccaccaaaccctcctcccgccttcccccacccctagtctctgtcttctcgctgggtctcggtcgccctctctttgggcttctgttccgctttctggatcttccgtcccctttctctttggttctcttcccacttctccaagttcccacccctccctgggagttctgggactggcacctacctgaggaccccgaccgggggcagggcgactcccgaggcagtgcggacgccccagggcaccaccagcagcagcagcagcagcagcagcagccgaacccgagggctcctggacacctggcgggtctccatcacctgtggagaaccagaaaggggctcagtagggctgcatcccggcccagaaccccgggccccaccatgcatccacccccagcttcccgcacagtcccctaccgtgcagtgggctggggcagcgatggtggcagcccccttatatcgcctccgcagcccccgcaccgggcagtgacgcaggccggggggccggggacgcggggtcaccccctccccaggctcattaggagccgccagcggtaatgaggagccgggggtgggggacctgccgctgccttggccgccaccaactaattgggaccagaagctggacctgagacgagggagggggagagacagacagacagagaggtggacacagggggtgtgtcagagggctaaaaatagagactggcggaaggaccgtcagaggaacagagacacaaagagaaggacaaagacagagtggccgaggaagaaatagagagaaagaatgggaacgacagaaaaagaaaggaaaaggaagaaaacaagaaaagagagcgaaggagatggaaacgaacagtcagatggagatggaggagggaaagaaaaggctctcagaaagacagacggaaatggaaggacgtcctggtctggaaggagctgcccagagataaatacagcagcgagaggcccagaaagatcgagggtgaggtagggaggggggaaaggcaagaaatggcaaagggtacgtgtggcaggggtgtgaggacaggaaaagtgacagaccacatcagaaaaacctcagagagtgagaagaggggaaaacagacagggctcctgagctgccctaaggatgtgtctaagcccttatctgggaggagtttgggggtgctgtgaagattaaagcccagtcctcctcacactgactctttttgtgtgtgtgtgtttgtctgtttgagatggagtcttgctcttgttgcccaggctggagtgcaatggcactatctcggctcactgcaacctccacctcccaggttcaagccattgtcctgcctcagcctcccgagtagctgggattacaggtgcccaccatcacgcccagctaatttttgtatttttagtagagatagggtttcgccaaactgttggccaggctggtcttgaactcctgaccttgtgatctgccctccttggcctcccagagtgttgggattacaggcgtgagccagcacacccagtccacactgactcttaagaggggcctcagccgggtgctgtggctcatgcctgtaatcccagcactttggaaggccgtggtgggtggatcacttgaggtcaggagttcgagaccagactggccaacatggcgaaactccttctctacaaaaatacataaattaggtgtggtgtaatcccagctacttgggaggctgaggcaggaaaatcgcttgaacctgggagagggaggttgcagtgagctgagatcgcaccactgcactccagcctgggcaacagagtgagactctgtctcaaaaaaaaaaaaaaatttaaaaagaggggcctttatacacagtgaggagaagatgggcaaaacttggaagtcctacagagcagtagaaacttgggatgtgggaacttgggctcctagtttcctaggaaggtggtggcagaagcttggactcctgagtctaagagtggatgggacagggacccagattcctatgttctggggaaggaggaggctggggacttggattcctgaatctgaggaaggaaggagctagaggactggagttctgagtctggggggagggagctgggggatacaacttaggggacttgaaataggaaggtaccagggaactagacccctgggttttcaggtaggagagggtagagggccaggaccactggtttcaaaaaaataatttgggccacatctccactagatcaatccagtttctaactcccttccccaccccagagaaaatgtcctttacttctgtccctttaagagtctaagtctgtcgctaggctcccaggatcccctgggagggggtgaggtgcgtcacctgtgtgcccctgagaccctacctcccaccgccctgcccagatctgttctgcaacattcaccgttctctgcatccagctctgcttatctgctgttaccttggacaccagagcaggtaagagaccccaggacctcaagtaagcctgtcccatcgatgtgtcggccgcctccacctccacctgaacacagacctatgcttctctgcccagactggccccggagatgccgaaatcctagctccatcttcaataacagacttgagagtcctgccccaaagctctcttcttcaagtccctacccctctactctgcagagcccagaccccagaccctatttctggaggactcagagctcccaattcctttctaactcaggaaccaagagctcaaggcctcttatctcctttcacccctgcaatccagcccccaaaccttgctccctcaaaattctaggcacctgaacttccagccttctcctctctaaagaaccaggagccaggaacctcagccccctcaccctgcaagacgcaggagtctgaacccccagcaaccttcttaacccagagcccaaatgtctccctcctccctcaaatccatgagtccagccctcagccgttaggagcctcctgtagtgtaaacaactgttgagtcaaggtgtcccgggggacctcggagaggaaggagatcccacgtcccctcgaagccctgacactccctaaagtcgaagtcgaggagatctgaggcctggagaagtgtcgttctttcccaatttttctaggacccctcgctgaaacagataaggaaattaactacgactcccaagtagccccgcgcctcagtctctcttggctacctgggccatcgccccacaagcctccaagggacttgcgattgggttctcttcccatccctggcgccaagctgggccccggacagacgtggtccacctgtgttccagtgggcgtggcctccgggagtgggcggggctcctgggagccttcggccttaaccccttccttcccgctctcccccgcagctataggtatctgccagagctatgaaatcattcagccggatcctcttcctcgtcttcctcctcgccggcctgaggtccaaggccgctccctcagcccctctgcctttgggctgtggctttccggacatggcccacccctctgagacttcccctctgaagggtgcttctgaaaattccaaacgagatcgccttaacccagaatttcctgggactccttaccctgagccttccaagctacctcatacggtttccctggaaaccttcccacttgacttcactgagcccctcaaccctgacctccgagaaaccccgcacccagagtctcctgagacccccaaagctgactcactcacaacctcaatatcagaatccctggacatgcccaaaactaacctctccaaaatggcacacccagagtcttctgagacccccacacctggcccaactgaaatgccacacccaggatcccctgagacccccaaacctaacttctccaaaacttcacgcccagaatttcctgagaccccaaacactgaccttatgcaaactacaccccaagaatccccagagattctgcagcttaatgccactgaagtctcacaggcagaactccccgagacctcaaacactaaccctaccaagacccctgaccccaaatccccagaaaagcatgacctcaactccactgagaccccaaactctgaatttctccaagctctccatcctgacccttctaaaaccccccacccagaatcccatgtgacccacaatcccagccccaccgaaatttcccaaacagaattccccacaacctactaccaaaatgcaacagatgtacccaggacctccgaccctcaaatctccactagtctctacccagaaacacctgtgcccttcaaggatgacgccactgctctaaatgagctgtccctgaatcccaaaccaggaacacctgcagccatccagcccgactccccaaaattgcccacttcagattctccaggaatggttgagctgaaggccccccagaactctggccctaaggagtccaacgtccctcctccctcagcccggattgcaggtccccctgctcttccagggcgccccagtcagttggcccctgccactctgcgggcaccccagaggcacagccgaggtgagggagtcaacaccatcatcgtggtggagcgagtgaaggagaccggtgaggggcaggagccggactcctgagtctgagggaggggctgggggcctggactcctgggtccgagggaggaggggctgggggcctggactcctgggtgcgagggaggaggggctgggggcctggactcctgggtccgagggaggaggggctgggggcctggactcctgggtgcgagggaggaccggctggggtctggactcctgggtctgagggagaagggtttgggaacaggaattcctggatctgagggaggaggggctaggagcttggacccctgggtctgagagaggagggggttaggagcttagattgctggtatcccccttcaggcgtgactctggtggggcgaccacgtggcgcagcaggcggggccctctgcctgttcttcgcggggaccgcgctgctgatcggcatctttgtgctgctgtggtgtctttaccgccgggcagctagacagcggcccttcgcacatcaccggcttccggacgacggagatgaaccgggtgagcgccctgccccttgaatgcctgcacttttccataacctggtctctcccggcactacagggcgccagccaaaaaagcacaggtcccccacccaaggtcaatgaaagccctggctcttccatggcaacgtccagccccctaaatgtctgcaatttcacccaagagtccagtgccgctcccaatgcggttggaaacggcttcaggcccagagccggccgtccccgccagccccgcccctgcccctccaggtacgcggcccggagccctgtacttcccgccctccactgcaggccccgccgctgctgatcggacgccacgcctcctggtttctgcagcggcccccaccctttttattgaaaactcagttcaaatgcagaatcggaatcctctctccggcctcctgatcggtcggccgcacaaaagcggccctggagatgatctggaagggggcctggagggtcagcccagagatgaccacgcccctttgcacccacagttctgcatttggacgccccgaaagacccctacgacctctacttttatgctccggatacctgggtcccttcccacatcgccaccaagcagcccccgcccacacctcctctgccaccaaagctgcccccgccgccccgcgggggtcgcccgcagcgtctggaggccctgtcccccgccacgctccccaacaacttcgtgtgagccccaccgagttctgccggacctgcacatccccacagtgaaggaaaaccctgcgcttctggtatgcttagctagagtagtgccccggataaagggtctaatatacagagatgcttgcgctgtgatcagagaacaaggtctgagaccgaataaatatcatgttcccatggctagacccctcctctggcctgagccctggggtgggaggggctggagtctgagaccgctgaaacttggggaggagaggctggggtctggacccctgggtctgagggaggaggggctggggcctggactcctggtctgagggaggagggacgggggtctggactcctgggtctgagggaggaggggctggggcctggactcctgggtccgggagaggaggggctggggcctggactcctgggtccgggagaggaggggctgggggcctgaaaccctgggtctgagggaggaggggctggggcctggatccctggaactgaggaaggaggagctaggggcctgaactcctcggtctgagggaggacggggctggggaccaggatgcctgtgacctccacagccaagaacaactgagcctatacaccaaagcttttattgggagtggggcagggcaggatttacagtcacagagacagagacacaaagacacaaccctgcactgggaaaaaacacccctggctcctgccccattccctttcatgggattctgtgacttctctataggttccccaaattctaagctgaaagaggggtgtctgagaggggaaggatcccagattttgagtcattaagcccctgagggacacaacaaatggccactgagaaacagggtagttcgaaaccacccaggagaataaagtgcgaggaattggggagggggcatcatgaaaccaccatgggggagttcaatggtggtagcttcaaacctttgagttcatggactggagcagccactatttagacctgaaaaccatgtcagaaaaagtgcacgggggtagagaggcatattgttaaaattgcgattttggttgtttccccagacattatgctaagctagggagaagagggtcttgagaaatttggtgctttcgcagaatctgctggtaggggagatgtgaagtgggcacggaatcggggacttgaaaccgccattttccatcagaaacgctggtgagaatcaatccctggaatggcggggacgagtaattggttaaaccaatctggaagatgcagaacagagttgggagagatttgaaacttctagaggaggaccttgaatttttctgaaaggagatgggagctgagtgatctcaaaggttagcctgagagtccctggagataaaggaaagcggggggtgtgggtgcctcaaaaccacaagagagagtaagaggtcgaactgtccattcaaataaagccctgaaaggagagatttgaaaccactgaggcagaacgggtggagagggaacctttaggggaatttgggtatccttgaaactgtcagtctgcagcttcactacccctgagaggcaattgggaaggaaagaggatttgacagcactgggaacaagggagagtgcttcttaggcctgaggcaggacagagaggagcagggttccttgacactgtcactcaggccagagatgagtggaatggaggtcctggaaactgccattcagtgggaggcacatggtcagtagtcccggacagggggtgggggcctggggggctgaaatgtgctgtgtgtggccccataggagggcgggggtgcagggggtgcccccgggggctcagcctcatcctccatttcgctgtcgtcactgccagccagctggtcatggccaacgaagccacacttctcctcgctcatctcctcaggctctgcccacggctgcttctctccagaagcaaagaccccgtagaagatgacacctccatagtgcaccagggaggcaattaggaacacgtactgccactcctcccgagtctgcaggggacaatagggctgaggtcaaatgggaggacagagaaacagaggcggagagagggggaggcctagaggaagggaggcagagacccagggaggctgaaaaggcagggatggcaccccagagacagtgccaccacgtggtcagttaggtacgaagcacacacttggaggcagactgagtcaggactgcggcacccaccttgtgcttagtcatggcccccacgatgatggggcacaccatgcccgacagtgtgcccacgccgttggagatgcccatgaggatgctggcgtagcgcggggctatgtccaggtggttcacgttgaaccctggcggagagacaagtcggaaggcgtcacaccggaatctcactcgagtgattcccactgggacgttctcaaccctctcccctccccgccactcatgttccaccttttgtgaggctgagaggccccgttcctgagccaggaagttccctacagagctgaccagagtcccccaagctgcggatccgcggttctcaccagagatggcgaagccgctgaagcccacggctaggaccaggaaggagatggccacgcccttggagtgcgagtagccgaccaccaacagcagcgtggcttccatgccgaagcctacgggggcggggggggcccgcgtctcctgagtgtcggccggagcaaggcgcaggctgccccacaccgcccttccagacctgctccagccccaaaccgcgtctatccaccccagtctggccacctccacgcccaggcctcttcgcgccctccacgccacccgcacccaccctaaccaggcccctacttctccaagacccagccctgaccacgcccaccagctccatcgcccctcccgtagctccaccccttgactaggccactccccgaacacgcaggatccctgctgtgcacgctcacaccttcccctcaatccccactcatgagtttttggttttttttttttttaatttttgattttttattttttttaagagacaaagtctcacgacgttgcccaggctggtctcaaactcctgagctcaagtgatccaccggccttcgcctccgaaagtgctgggataacaggggttagccaccatgccctgcctgttttttaatttttaattgtaattttaatttttctagaaacaaagtctcgctctgtcgcccaggctggagtgctgcggcgcgatcatagctcactgcggcctcgcagttctgggctccagcgatcctcccttctcagcctcccaagtagatgggaccacaggcgcgcgccaccacgcctagcaaatctcacttgttagacagcaggccccctaggaccctgtctctccaggtgccttgctcttagcgcctcttcatcacctagttcatgtcctaccacacccaactttgtgcaggtcttgtccctccaggcccaactcggtcttctctctgctccacccgggaagtctcgcccaccctgcccttccgcgcggtggccccttggacggccgcgtgacagtccctttcatccaggcctgccctgccccggctccaccctgttggccacggccctttgcatagaaagggactcctggggcaggctggatggtttccgcctgtaaccactccccatcacctctcaatccggctctgctccacccaggctgtcctagagccggcccaggccccgccccactcacctccgcagttcatcaacttgcgcacgttggtggtggacatgatgcggcggctccgcaggaagtccgcgatctggccgccgatgggcacgatgatggtcatgaccaggtggggcagcgcggacaccaggcctacctgcgggaacaggtgtacagggacactagggttcggggccgccggctcggcgtctctgcccggtccgtgcaccaccggctcctccctgcctcgggatcgccgccagttccctcccgccgacccctccgcgcccccctgccctctcctcctgggctctaccttgctgatctcgaagccgaacacttcttcgaagtaggcgggctgggagatgagcagcaggtagaacgtccagctgcggcagaagttggccacgatgatggcatagactggcatagacgtgaagaagcgccgccagggagtgctaaacttctgtgggggcgaggggagggccgctaagacggggagcggggctgagggcttctccgcgtcccttcagggaccacagtgtagttctgcagaaaccaaaggatcccgaccgcactgaaacttctatggacccaaaggcgcgggctacaccatgttgccgtggggacccagggatcctagcctcaaggtgacacttgagtgatgaaggggtcctggccctatggtagcctctcaggtccgcaggtgtccgggcccctcagggacctgtctttttctttttttctttttatttttactttttgtattttgtattttgagtagagacgggggtttcgccatgttgcccaagctggtctggaactcctgggctcaagcgatcctgcagcctccacccccaaagtgttgggattgcaggcggaagccactgagcctgccctaggagtctctttttatcaaaaatgctcccaaaatacagcctcaactcaaggtctaagcaaaacccccacattctaatcccttctctgctggctttaactatgccctgtcagtggttctaatcctgctcaactcccgacctaaccctgcccccagcacctgagaatctcgtcctccgcgggttgcaacccgcctcctaggttctagcccctctctttgcgttccagtcccgtctcctctagagtctgcaggaaccgtccctgatctacacgctgtgcaggttcgtggcttgctatctctccccgccccttccccgaagatttggtcccggaccgtgagggggttcatgagtttcgcgctctctccgatggcgtcctcgatgtacttgcgctcctcctccgagatgctggggtgcagcgcgggggactcgtaggagacgagcagccagaacaggtaccagaagatcccgaagctgcctgggggggtcaggagggggatgggagcgaggtgaggaccggccccgctccgccccagcgccacccggaaccaggcatccgggtccctcaccgtagacgtagaaaacagagctccatcctgagtactgcacaaggaccccggcgaggggcatcgcgaccaccgccccagcataggaacctaagggggaggatgcgggggagagaacaggcccatcttccctcagatcaaggagtgcggacccccaccgcttccccctttccagacactgaattacaggccacagcccctcctcccttagacccaggaatccaggcctagcccctcctcgctcggacccaggaatccaggcccccagctcctcctcccccagacccaggagtccaggcccccagctcctcctccctcagacccaggagtccaggcccaacccctcctctctcagacacaggagtgcaggcccccagctcctcctctcagacccaggagtgcgggcctccagtccctcctccctcagacccaagagtccaggcccccagcccctcctctctcagacccaggagtccagccccagcccctcttccctcagacctgggagtccaggtccagagtctcctcctcctccctcagacacaggagttcagcccccccagcccctccccgctcagacccaacagtccaggccccaacccctcctccctcagattcaggagtgaggatccctcttcctctcaccacaaaaggctgtcgtcgccaggcgactccgttctaagggtggggcccatttgctccagatcccatggcaggcggggtatgtgaccccctaaagaggagaaaaccaaggtcactgagaagaggcagggtccgagcgagggcagggtcatatcaggcggggatttacctctaccaacccctgcaggatcctcacgaagatgacacagccatagtggacgcgggcagctgaggggatcagcatgtttagagtggatgttgccacaatagcaaagccgaaaactctgatgggaagggtcagagaaaagaatccaagctatccagccatgcccgggattctgcctttcccgcccacagcaagctaggcccagtggtccccgggaccccaggtcccaccacctctctgacttacaccttcctcaatcgcaagccccacctttctctaagacccacccccaaatccaggcttctcccatttaccagagccagcccgcaaattcaagaccacgccctctaactccacccacacaactgtagttaccgcccactttgagaccccaccactgtacctgttggctgcaaatttttgacagataaatcctcctggaatctgagtgacaatgtagccccagaaaaaggagccgtgtatgaggccgacagtctctggatcccagctgaactgggctttctgcgggccaaaatgtacattaaatcagccgccctgtccaggctctgccgctccaccaatcagcacccacagacttagcgtctcgacctatcagcaacgaggaacccctcccacctccaaaagcctgccaatcaaagctcacactatctttctgtcaattaaagtctacaaactccgctcttccacgttgctagggcctatgctgccttaacaacagagtccatcaccacctagacgccttgctttgcctgcttccttgcctccatgaaagcctaggggcccatgtatgatgatgactctctccacttatatccagcttatgagcgtttgcggagtgacctgcacagggtccaggcggggacacgaagcagccaagggggcggaccagattggaagggagcaaggggaggaacttcaggtaggacaaaggcacaaatcaggactcttttctgatgcaggggcaaggcctatgctgaaattaaaataggagaaaggacagggcacggtggctcacgcctgtactcccaggactgggaggccaaggcaggaggatcgcttgagcccaggagtccgagaccagcctgggcaacatagtgagaccttgtctctacaaagataaaaataaaaatgttagctgggtatgccggcgcacgcctgtagtcccagctgctcagaaggctgaggcaggagagtcacttgagcccaggagttcgaggctgcagtgatggtgccactgcactccagcttgggcgacagagcaatggccccactgcaccgtagcctgggagaccctgtgggtctttagataagggacacaacacatgcagtgggacgtaggcagtggcagggtttcaaaaaaggatcacattcagggaggaacctgagatgggactgagattaaatagatgtgacccggggacatgagcttggggtacaggcgtgagcaaaattgctagtaggtccaaaatggggcaggggcaacccctagggaacctgatgttggggcggactctacatttttcaatcaagcccctggaaataagggcgggacttcatttagatcaggacggggcttaggaaacggaggcggcccctaaggcgaggtcagaactaaggggcgcacggattgggcggagctattccgacagcgtttcggaaggggcgtggcctggacgtctggtgggtgagtgtgacgtcatgggggcgtaggcggagctcggtgagcggggcggggctctgcaagggctcaggccttgagctacctgcaccaccacgtggcccccgcggtgggtcgtgctgttattgaccatggagacgatggccacgcccaggttgcagcggatgccaaagctgatgcagaagcccagaccactcatgatggcgataatgtagcggcgagggaggccgaagcaggtgcagtccaccaccggcgggtcccgggtctgcgtggtcaccgggcgcccatccgcactcagctccagcgtctccgcgccttcctgccgcttctccagaaggctgcgggacagcaagagccagagactcggaagtccaggcccccagccccctcacccccaagaccaggatccagggcaaaacctgcttttcaacatccagaattctaagcccgcacctcctccttcaccaagagtccaggtccctggctcccttcgcccccctgatccagaaatcctccatctccctcagaccgggaattcaggcccccagccccctccttcttcacattgacggtcttcagtccccctctcccagctctgtcaaatccttcaactcaggagacttagaccccagacaaccctttgggattcaagagcctgtgcccccactccgaggcccaaagactctccagccgcctctcccggataagagtctattcgaggaagcaaaaggtgctaaggagatgcttcagcaaaggtgtcaaaagaacagatgcttctcagccacgtttgctagggggtggggagatgtccaggaccctgggaatccagcagcccgtcccaggcatccctagggaaccttgagtccaggctgccagcctagggggtagggagggggagtggcgggtggtgtcctggcaggggacagatggccctggtagggggattggctcattccccagcgtgactctcgcccccgcccgttctggatccagaatcaagtctgtgatgacgaagagggtatttggagggctgcctcaaacccagagagaggctgcagagagagagaggtgccttcagacaggtggagaaagacccaaaaagagggtgacagagatggggggagttgtacagaggcccagagagagggggtcacagacagaagaagggagagagatccagtgaaagggggacagagatctagagaggaagagacagagacccagagagagggagagagaataacaagggagcagagacccagagagagaaggggacagagacccagagatacagggggacagagacccagagacatagtgggacagagacccagaaagagggggacagagacccagagagaaagggagacagagacccagagagagaggaacagagacccagatagagagggggacagagacccagagagagggagagagaataacaggggagcagagacccagagagagagggggacagagacccagagatacagcgggacagagacccagagacatagcgggccagagacccagaaagagggggacagagacccagagagaaagggagacagagacccagagagagaggaacagagacccagatagagagggggacagagacccagagatggaggggtcagagacacagaggatgacagagacccagagagagggagacagagacccagagagagggggagagagacctagaaatagggggacagagacccagagagggaagagatggaaacctagagaaggaagcagacagagtcccaaagagaggcggggacagaaacccaggagatagaacatagatgcagagagatgagaacagagatccagaatgcaagagaaagatggagagcctgggagacggaggatagacaggctggggacgtgatttgtgaggtgcagcccctctctgaggtgggtaggcagccaggggatcgggctggatcccaggaaggggctggaacagatggaggcgagggagactgggacgggggaggaaggaacagccagacggtccagggggagggaggtggaagagctgtgagaacacagcaacccctccccatcctagaacttaaggaggtggggaggggcagttaagaaacaggggtgggagaagccagggagtggacagaacccagaaggagtaggaatgagaccccaagaggaagaagacagagagccagagataggggggattgaagccactaggacgaatagtacaggatggcagtaactccccccacccatcagaacccatcacccaaagagattagactgacccaggttgacatcggatgatatttgaccctgaaactcaagatgtgattgcagcccctgatgtgagattccttgttaatatgaggagatgtcagatctctaatcaaggctgtctaaacagggggtctcagtatcccacatctataaaatgggacaagggcaaaaatgcaagagaataaagagggaacttcaaggtgatatcaatcattttagagcaagaggaccaaggacacagagatgaaggtggccctgatgctttgcaggggacaaggacagagaagggagaccctagatgtaaatccccctcccctccctggataccccaaactcaggcctggggacttggcgatgaggaaaaacaacacttaggaggccattaccccaaattgagatgtctcaacttctctgtctctccctctctctctctctgcttctctcaggatctctgtccactcccccacgtctttgtctccttatgtccctctgctctctcttctcttcccattgtacaactaaggaaactgaggctcggggagctgaagtggcactccaaggtcacagacaagaacagcaatgggacctgatcccttactggccctcggcatccccctgcccaagacctggctctcagaaaggaggcaccttgggttctcatctctctggcatcccattcccccatgtccttgttccaagtcaccctgggtgcaaggaagctccccaccagctgtggcatcactcttctcaaggaagagctctgttctaggcttgggagggagactgacctgggttcaaatcatggggctcatactcatccactgatctccccaaccccagaatggagcctcagtttccccatctttgtctagaggattaaatgagatcaacctgttgtctctaatatggggtattcccctctccctccaaccatcagagcaaaccccaggcattggaagcaaatgcttttctctgcacaaactccctgctgatggtcctggccagagcccgggggtctctggggacccaagaggtaactcagagagtgagagccagagagattgactgtgagaaaccctagcacagatgagaaacagaggcagagactgagggaggggcctgaggaatacatccctcccgctgccaccccccagccccctccaccagcacgtctctttctctctctctcattctcctgacttcacactgatgtattttgagaaactcgtgaaaggaggcgagaaaaagggtggggaggggctggaaaattggaaaaagaaggggtgaggttatctcagcttcccctccaccaccaacctccgtcactgcaccatcctcctgcccacctccccccacttctgtccagccttattcttgtctctcatgttactagagggtggggtaactttggagctaagaggtgatctgcagcaagcaagactgatgttagacttagcaaaggacccccatggcctagcgaggtggactgaagctcagcgaaacacagggtcagggctgtgggccaaggggacagggcctgagggcacggcggcaggggcatggtgctgatgaggccatctccttcgtgcactgtggccagatatatttttaggcttttccgcagctgagtaatttatctgacttagagccaaagctggggttgggggtgagagcctgtggggaggtgtccagattatcctgagggacactcggttcactggggtcatcaacctggttgggagggagtccctgtcagccccagcctgtatcctttgggaaggctgtcctaccccaggagccgaaatttttggcctctaactcctttctctcccagggacccagggtgctgtgacttcttccacccagcctcaccccctcaaggacaacgggctatgagccccaatccgctttagctgcagattaaactccatgccagacagaaacggaaaaagacacagagagacggagagacccatggtgggagaattaaaacacagagacggggacagggacccagagaagtggggaccagagatccagggaagaggagagacccagaaagagggggacagagactctgagtcaggagttgatagagatccagtgagagcaatggccagagaaccagagagaggggcacagagacgcaaagaagcggaggcagagatctagggagaaggaggggcccagagagaagggagccgagatctggaaaaagagggagacggagacccagagagaaaaggggcagagacatccagaaagagacggggacagagacccagaagtggtgggggaggagccagagacccgggagagaggcatttacagcaccagagagagtggagccgggtggggtggggtgcagaaaaaggaacaggataatggacaaggctcgaccagggagaacagcgccgtcggagcccacggcagaaaactggacagatgggtggacccccatgccggggtatcgcccgttcatctgtcagtctgcgcccaggtgggaattagcatcctcctcagatcctcccactcttctcccgggacccccgccaggctcaccggtgcagcttcccgagagcacgacccgctagcttccgaaactcctcctggcggaactccatggtggcggctcctgccgccggtcaccccgcgggtcccccccgccgatccccccgcccgcgggcccgggcggccgcgtccgggttcccggggtccagccccggcccggccggccccgcagctccgctcggggggaaggaggctgcaagtgcaggcggcccgggggctgtcacaggactcagcgccgggggcggggcgcgggaggccccgccccggccccaccaggcccctcccctcgtctgtcagacccgccccctctcgcagccctttcatcctcgtcctgtcccctcctgagccttccaagaccacgcctgtgggttctgaactcacgcctccgagttcacgccccccaattctgttccttccccaggctactccccctatccctgttccatcacccctggctcctacccagattttctctcctctcctgagttctcatccccatcatttctctccccgacttctgttccccctaattgcgtcccttacaatcctgtcttctctgactttccctctgcgttcatcctccagttccttcactcctccccgcccccaccccgcaattccatccccatcccacctcgtccccagttccaatagtctcatccagggagttctttgttttctcattcaagggaaattctttcccctcaagtccaacgcctacttcgatccacctgtcgtccccctctagtccctttcgccacccgggttcttcacccttgagctccatctcctccttagtttccatctttcccctttgaatcccatactcctccagctctattctccctccggcgtctctctcctccctgttgcttctctccctgagtttcattccctaaccccgattttcttccctctggcttccgccccccacagttatatttcacacaccccgccagtgccagctgcgaccccatagtctccccattgtgttatttctctgctcctctgggatctgtccgcgctctgagttcttccctagctccgggggatccattcctctatttgagttctgtctccaccccctgagatctgtcccgccccctaaattgtgatccgcaccccctggcatcctcacccgccctctgaatttgtctcctcccctaggatctgtcgctgacctgagttctgcccccgccctctgagttctctccccaccgttggagttgtgtccccttctcctaggatctgtccctggctctgttcccgccctctcagttctgtccttgccccctggaatctgttcctgccatctgagttctaccccttccccacaggatctatctctgccccctggaatctgtccccacccaccgagttctggcctccgtccctgggatctgtccccgccctctgtgttctacccctgccccatgggatctgtccccgcccacccagttctccccgccccctggatctctccctaccctcccagtcttgccccggccccatgggatctgtccccgccctccgacttctgaccctcgccactgggatctgtcctcgacctcccagtcctgcctccgcccccggaatctgaccccgcccaccgagctctggcctccgcccctgagatctgtccccgccctcccagtcttgcccctgccccatgggatctgtcccccgcccaccgcctccgcctctgggatctgtccctgccctcccagtcctgctcccacccccggaatctgtccccgcccaccgaactctgtctccacgccggaattccagcgccgccccgttgggtagagcccggcccttccctgtcctgggcccgcagacagggtcccgccccgctcctgtcctcagaccagcccatctcccggcgctgagtccacctccagatccaggccccaggagggtgatcctttccccactacctccccgcgtcgggccgcaaatgcatttggtattaaattttcatgatgcggcccgcggtggggtgggaggagcagacggcgcgtcgggcgggcgccaaggacggggtggccgggaagccactgaccgccgcagcctctcgcttccagccttgactggctgtgtctctgggtctcacagctttgagaaacccctgggaccccagaacggaggacgctgcgggtctgaggcaggagggaggtaggaactgggactcgtggggctgaagtagcagcgcgggagccgctcacacgcgccacccagtggctgcagagtccccggcccgggtgcggaggcggtggttgcggcttggggccaggtgtgagggtggagcagatggtgaagaggagggagtgggaagcgggccccgccgctgccaaaacttgggcctttgccgaaaccatcgccatggaaaccgaggaaggaggaaaggactcagccgcacactttttcaggacctgggaatgagttactcggccccctccagcggctcaccgtcccaaccacaagtcccagcggcctctgagcctcagcgctcgtttgagaagggccgcgcactccgagggccgctgggagatgtagttctctgagacgatgggcagggaaaggttgcgccctctggtggacacggcgcccacgttcgctcatccgttccgcggccggaaagaccctacctgaagtcactcccaccctgacctcttccccgtcttttctccccctccctcacaattcaccccattgcagacacattgtgcttgcctgcctgccttttctttccttccttcctcttctttctcttcttttttctttccttccttcattccttctttctctgtcttccttcctttccccttcctccttcctttttctttttttctttccttccttcattccttctttctctgtcttccttcctttccccttcctccttcctttttctttctcttcttttttctttccttccttcattccttctttctctgtcttccttcctttccccttcctccttcctttttctttctcttctttttccttctttcttccttctttccttccttcctcctttccttcctcccttccttcctttttgagacagggtctcactctgtcgcccaggggcagctcactgcagtcttaacctccctgggctcccacctcagcctcccgagtagctgaggacaacaggtgtgcaccaccatgccccactaactcacattgtgctttgagcatttaccactgaagttcctccatctactgatgatcctaggattcactaaagaagaggagggtatagaccatcacttttttttttttttttttttttttgagatggagtttcgttcttgttgcccaggctggagtgcaatggcgccatctgggctcacagcaacctccgcctcctgggttcaagcaattctcctgcctcagcctccctagtagctgggattataggcgcttgccaccacgccaggctaattttgtatttttagtaagagacggggtttctccatgttggtcaggctggtctcaaactcccgaccttgggtgatccgcccgccttggcctcccaaagttctgggactacaggtgtgagccactgtgcccggcctcaacaatcacttattaactcaagaaatatttatcaaggcagggcgctcctgtaatcccagcactttgagaggctgaggagggctgatcacttgagctcaggagttcgagaccagcctgggcaacagatggagaccccgtctctataaaaaatatttaaaaattagctgggcatggtggcacctgtagtcacagctacttgggaggctgaggtgcaaccatcacttgaactcgggaggttgcagagtgagtcaggattgcaccactgcactccagcgtgggcctaagagccagactctgtcaaaaaaaaaaagaaagaaagaaagagagagagaaaggaaggaaggaaggaaggaaaagaaagaaagaataaagaaagaaacttctgcagatgtactgggaagaggatacaaagtagcaggaacagcagaaactaagagatgagggaaaatgggtgtggtcaggacactgttcagtatgactgggctccagttagaggaagaggtcaaaactaggctgggcacagtggctcacgcctgtaatcccagtatttggggaggccatggtgggaggatcacttgaggccaagaactcaagaccaacctgggcaacatagcaagacctcatctctaaaaaaatgcaaaaaataaaattagctgggcacaatggtgcatgcctgtcatcctagctactcagaggctgatgtgggaggatcactcgaacccaggagttccaggctgcagtgagctacatgattgcaccactgcactccagtgacagagtgagatcctttttttttttttttttttgagacggagtttcgctcttgtagcccagactggagtgcaatggcacgatctcggctcactgcaacctccgcctcagcctcccgagtagctgggattacaggtttgcgccaccatgcccagctaatttttgtatttttagtagagaccgggtttcaccatgtcggccaggctagtcttgaactcctgacctcaggtgatccacccagctcggcctcccaaagtgctgggattacaggtgtgaaccaccgtgcctgacaaccctgtctcttaaacataaaagtgagccatgacccggggctcagatcacacagagccttgagtgcttggctgaggggcttggaccttctcccagggcggctggggagccacaggagggctgtgaagaaggaaagtgcagggccagctctggggcctggggaggattaacaagggagactggaggccaggaggcttcagggaggatccagggggaaggatgaggcctgagctggggcagtgacctctataggactggaggggcacagcccaatgtccctcttccctcccaacacccacatatccccagtcagagacagaacaaaggcaaaaatcttttatttcaacttttagggaagccagcagcctcttctccacatctcagaagcacaaggagacaccctgatcaagaaggcaccggcagaagcggcatggccaccattaattgctgaggagacagagcaaagagaatgaggatccaggacccagaagtccagctcccagcccccctccctgggagacagagtccaggccccgccaatgtcccagcttccccaagcccctcccccaggcacctttctcttccggtggaaggctgccttgctctcatgagagttgatctgcagcgggatataagcgtctagatgatacagctgctgggggccccccatcaccaggcggttctccccgatctccagcgacagccccagggctccatcctggagaggtggcggaatcaggtcaccctccccagcaacaggatgatcacctggaccaggcatggtagcctcacacgctgggaaactatatttgaagggtctaatctcccaggaagagacagaagacagcaattacaagtctcaacgaccgagcacttacaatcccttgggcgccctcaggacagcaccagaaggtggcctgtgggcctcctggcagagaggacgcaactgacaagtccagcaacaaccccttgtcactcacactcagagacagtccctgacctttccagacctcattcccctgctctggtccagcgcgcaaaactcaccagtttggggaggtcaacttcggccaagaggaggtcgggggcttccagccacaggttcaggtgaggcttttcaggcctgaggaggaacaaggtccagggctgagcacagctgccaggtctttgcctggcgtgctgtcccttttctccctccaaccagccctattggcctcaggacgccttcccagtcaggagttctctctcctccctctctcagtgcccagggccccaggacatcacccagtgtgggaggatggagggagggattcccaagagcgttgaggaaacatcagaccggggatctaccgaaggcccaccctgactcagctctcccgggggcgggcgtgtacaggtcccccagctcctggatccgaggacgctgctccgagcggatgttctgctgcgagatggagcccatgaatggccggttcttcatcatgcgccattctgagggtcaggagcgccgtcaaacatcgtacaggtcagggttccctttgtgggggccaagagcctcccgggataggctccaccggctcaccaggactcttggggtctgaccacaccccgcaggcttggctccaggaagcccgcccaccttagtcacgcccctcccatgatatgccccaataaaacccacccctggagatgttcctggccccgccccctcagggcgtccagactccaccccctcctagtagcacagactccagggcaccctgcccaagccagcccctcctctcctaggggtgttccccaaaccgctcctggctccactctttcccgagggcccaggacctgcccctcacccggattcagctgcaagttgtatttgtcctcaaggccctccctggcgatggtgatcacgagctcccgcaagaaatcgctgttctggggtgacagagagggaaaagacaggcggtggcggggagggtaggggtagagacccctgcccaggcctcaaccgcagccccgcccccaacctgcatcctccggtagaagtcgctgttgacagctacgtcgtaggcggtacatccctggccttctgcggggagaaaaagggggtgaggaccccccagccctctgcaggaagcccacagcccagacccagacagggaagaaacattcagggacagcggccgtaagaagcagagagagacataaggaagtgagagctgggcactcactttccgctctggactctccgcccagcctcctccctggcctcttatctcctgtccatcagtgtgatgtcactagagttgaccctatcccttccctgctcacagctcttctctggctccccagtgctcccaagtgaaggtctgagccccacaagcctggcgttggagaccctatgtggtctgcccctcccacctctggagaagacctcattcttctagcaacctcggcccactgaatttctttcagtcactctccattactggctgatccaatccaatcattctctcccagctctgggccgctctacctagaaccttcttctgtctgcctgctgaactcctcctgttccttcaaatcttatcccacaccccctcctccaggaagccttccctgaccccttcatgtgggtgacgagccctctcaaggctgtgctgggtgcccccctccaaagcagcgtgaatcacaccctattgatactgcatccatctccttgagccccacccatgacagcgagtttctggaacgtggaatgtgcatttcataggtccttattccccggggcactgcctagagcttggtcccagaaagcttcaagagacatattgaaaaaaggatatagaggcagaaacagggacagaggtgaggcaagacagagatggagaaagggagaagggcagaggagaaaacaggatgaaagagagagccgcaggctgggtgcagtggctcacacctgtaatcccagcactttcggaggctgaggcggtggatcacctgaggtcaggagtctgagaccagccaggccaacgtggcgaaaccccgtctctattaaaaatacaaaaattagctgggtgtggtggagcacacctgtaatcccagctgcttgggagcctgagacaggagaatcgtctgaacctgggcaacaagagcgaaactccatcacaagaaaaaaaaaaagaaagaaagaaaaaagaaggagacagcaggctcaggactaaagccaggagatccgctaatgcacgaagagcactctgcccaggcctcccggccctggagtggggcatggaaaagtgccagcctggccaggtggcagaaccaggactgcccgggtgtgggatgtccagggcactagagatctaccatagggaaaagaatcagatcgaggggccagatctccaggagctgagggaggagggtcctgggcccaggattcttgggttctagggaagaaggggcctagcgggccagactcctgggtcctctgagggcactgacttgcatccagttctgcatgaggctctcccagactcatggggatgcgaaacccagcttggtcctcctctagcatctgaagcagctcctcctcggtcacgtcggcgggaggagggatagagggggagtggcagatgttgatgaaaaccttcccttccgaggagttggtctttatgcagaaacctggtgggagtgggttagtcatgacaatccttttctgcacaagtcccagtccccatccattgtctccaggctctgtctcttttccttttgccctgtcccccttttttgttccactccccacccgagatccctcacttctcttttttttttttttttttgagacagactctcactctgtcacccaggctggagtgcagtggcgtgatctcggctcactgcaacctccacctcccaggttcaagcaattctcatgcctcagcctcccaagtagctgggattataggcgcccaccaccacgcccggctaattttcgtatttttagtagagatggagtttcaccatgttggccaggctgatctcaaactcctgccctcaggtgatcctcccgccttggcctcccaaagtgctgggctcccggccccctctcttctttgttttctccttgtttgttttttgagacagggtctcactgtgtcacccaggttggagtgcagtggtacgatcttggctcaccgcagtctcttccacctggctcaagtgagcctcccacctcagcctcgtgagtagctatgactacaggcacgcacccaccaagtccagctaattttgtttatttttagtagagatgaggtctcactatgttgcacaggctggtcttgaatgcctggcctcaagcaatccttccacctcggcctcccaaagtgatggaattacagatgtgagccactgtgcccagcctctcttcctatctttgttgttgttgtttgtttcgttttgtttttgagacagagtctcgctctgtcacccaggctgcagtacagtggtgcgatctccacccactgcaacttctgcctcttgggttccagcaattctcctgtctcagcctccccagtagctgggactacaggcacgtgccaccgcacctggcctcttcctatctctgattctctggccccctacctactcctactctgtcctccaactcctttctgtcctaggatgatctctgtgggtgtctgctcaccccacccccaccctaggcctttattttcgtgtctctttccttcctcctctctctgtcctctccctgggtctcctgtccctctctctccggtgtcctttctcaccaggctgaggctggatttgtgtcgattctggtctggttgtctgggcttgctggagctccttcgaggcctgtataaaggaaaactacctccaggctcggagtctgtgccatcagacccctcatttgttcctcaaatggagcaattcttatgcatgagagctgtggataacgcgagaaattagacggtttaggtcccctttctcctttgagaactagaagaacaaccccaaccccattcccatttctttttttttttttttttttttggagacggagtctcactctgtcgcccaggctggagtgcagtgccgaggtctcggctcattgcaagcttcgcctcccgggttcacgccattctcctgcctc[175 bp omitted]cccggccccccactcccatttcttagcaaacttgaagcccattaacctcaattccccgaggcctggttcccgccttagtgcattctgggaactgcagtcccatctttgagcaccccgccaaaatccccgaatactcaaggatccaggggtccggtcactgcacctgcagcagcagctcctcaaatcgcgccgaatcagcaccgatcgcctccgcctcgcttagccccattcccagcagcttcgggttcgccatggccctgggaaagagatctaggcgtcctcgagaccctcaacgtgggaaactttgcccaggatccgaaccccagtgcctgctctggccctcaatcgactccggatacctactatcctgttcaaaaacctaagactggcctaagactacatttccattcaagaccgaacaccatcgtcaaatccgtggggaatatgtgtctctagacgcactaccctccgtcctacgtgccgaactgtaaacgaagccacacttccggtctatcggtaaacacaggactggagtatgccacacttccgagtaccccagtgttcattcacaagctggtatcgcgttatcgacaagccacgcccctcgcatcaatcaaaaataaaccccaaggcggatccctgagtgccacacttcctgtatctatgaaagccacacttccggctgggcgctgtggctcctaccggtagtcccagcactttggaaggccagggcaagaggatcgcttgaggccaggagttcgaaaccagcttgggcaatacaatgagataacgtcccacaccccatctcttaaaaaaaaaaaaaaagcgccagacttccactctttccacaaccaaaactggcccccttactttgcagtgaaggttgcattttccaaaccttaatctcaatgtccatcctaaaaggtaccctttttatctttgaattatcacttcctgccagctctagatcctaatacgtccagatctagacccgccaggtctagatctagatctagacctctagtcaatataattagaaaagctgcactttgaggctgggaggccgaggtaggaggatcgcttgagcccaggagttcgagaccagcctgagcaacatagcaagatcctgtctctaccaaaaaaaaaaaaaaaaaaaaaattagccaggcttgatggcacctgcctgtagtcccagctactgtgcaggctgacgcaggagtaatgtttaaacctgaaaagtcgaggcgacagtaagccgtgatcggaccactgcactccagccctgggcgacagagggagaccctgtctcaagaaaataaaaggtaaaacaaaacctgcacttcctgctactataaaacaaggcactgggaagacgcatcaataggacgaccctttttttttattactattttttttttagacacagtctccctttgccacccaggctggagtgcagtggcgcgatctcggctcactgaaacgtacaccttctgggttcaagtgattctcccgcctcagcc[131 bp omitted]cggcctcccgaagtgctgggattacagccaagagccatcgtgcccggccacgccgatcctcataaatccggagccctcctaactattcgcaaagtacccacatcgccgtctccccttcctccccgttttaagcagtgcgcatgctcctaaatacgcttccccgtgggggacgtaggcggggccatcgggtcctaaggaaaaagtgtgggcgtggctgctctctgtatcttgtagccccaccccattcccattagccccgcccctttgggctggaaccggaggtgtcgctcttcggacctcaaggttccccttaacacagagcgccccgcagtcttcgcggaaagcgttcggggtaggcgatggctgcgacgcgtgcagggccccgcgcccgcgagatcttcacctcgctggagtacggaccggtgccggagagccacgcatgcgcactggtgagagtctgcccggccggcgctgctcgctgcgttccccaggcctgggcgcccggtttttcgcggggagtcccgtcatccactgcggtagctcagccgctccgcctctcttagtccccgtgattcccgccgcccaataggatcgcgccctgtaggacgctcccttgagccttggcggtggcagccttttagtctgttccggtcttccccactggttctcttgccccttgatcctgaactcctcgtagtgtttccgcggttttcctgaactcctctagacgctctcgtgattcctcagggtcccctcagaacctgacgccacccaccagaccccttaggattcctgtgaggctccagtgacccacaacccccattgtctttccacgactcttcaaaacatcctatggcttccatgggcctccagagcaccccagacctcctgagggactcccttcatccctttgattacccagagaccttcagaacttccatggagcccccgtgatcccataggacccctcaatactcgtggggttcatgtgacctcatcggaactctcaggagcctagaatacatcaggacttccggtttgggttgggttttttttttgtttttttttttgagccagggtctcactctgtcgcccaaactgaagtgcactggcgctatcacaccactgcagcctcaacctcctgggctcaagccatcctctcacctcagccccccaagtaactgggaccagagacgcgcgccaccactctcagctaatatttgtactttttctagagacaaggtttcagcatgttggccaggctggtctcgaactcctggcctcaagtgatccacccacctcgacttcccaaagtgctgggattacaggcgtgagctactgcacccagccacatcaggacttcctgtaattacttatggcccctcacaataccctcacggggctcctatgatctctctagctctcagaatgtcccatagggttcccatgattgttcaggaacccctgaagtcctcgtgagggtcccatgatcccctgggggtcctcagaacctccctaggactcccatgacccctcagaggcccccagaaccctcgtggggttcctgcaaatgagtagggcacctcaaactttctgtcgtttccccaggcactctcagaattccttcacggggctctcatgatcccccagggtcccccagcacccaggcgaaaggagcttaggcttctttgagggggagggcaggaggccagagcaatgatccaagtggaaggaactggatcagaaccctggcacagcctagaacttggggaggccaagacgggcagatcgcctgagctcaggaattcgagaccagcctgggcaacatagtgaaacctcgtctctactaaaatacaaaacattgggccaggcgtggtggctcagacttgtaatcccagcactttgggagtcctaggtgggcggatcacctgaggtcaggagttcgagaccagcctggccaacatggtgaaaccccatctctactaaaatacaaaaattacctgagcgtggtggtgtttgcctgtaatcctagctacttgggaggctgaggtgggagaattgcttgaatccaggaggcagaggttgcagtaagctgagattgcaccactgcactccagcctgggcaacggagcaagacgctgtctccaaaaaaaatacaaaaatggctgggcgcagtggttcacacctgtaatcccagcgctttgggaggccgaggcgggcggatcatgaggtcaggagatcgagaccagcctggccaagatggtgaaacccatctctactaaaaatacaaaaaattagctgggcgtggtggcaggcacctgtaatcccagctacttgggaggctggggcaggagaatcgcttgaacccaggaggtggagattgcagtgagccgagaccacgccactgcactccagcctgggcaacaagagcaaaactccatctcaaaaaaaaaaaaaaaaaaaaaaggaaacagaaaacaaaagattagccgaggatggcagcacacacctgtagtcccagctacccgggaggctgaggtgggaggatcacctgagcctgggaggtgcagtgatcataccactgaactccagcctgggtgacagaataagaccctgtcccccctgaaaaaaaaagaagttgaggccaggcaagtggctcacacctgtaatcccagcagtttgggagaccgaggcaggaggatcactcgcacctaggagtttgagaccagcctgggcaacatggtgaggccctatctctattaatataaaaataaaacataaaaagtgaagttgagacttggacttgagtccttgcatttcagacccgtggtcttgcctacaccagcaaagttctcaaccgtacagtctctgggccagactcaaccaacaaacatgttttctttggcgtgaactttattttttttttatgtgaaatgctggacaattgattccatgtaaacatccgggaggtcctcttgaaaataaaattccaaaatgtgtcaacatttggctcaacttccctgacaaaagtcatctgggaccaatagctcctgtcttttccatgaatcgttaagctcctcttctcatccaggccctcttctcaggcctcctggaaccctctggacattcttttggaattttgtttttcttttggggggaagctttccaacttgcacagaataattagcatttattttgaactcctgtttacccatcactgtgcctcaaccatcatcaacatttatcccagcgctgtttccttctgtattttctttggagtaatttaaacaaatcctggatgtcacagtattttcctataaatatttgaatcctttcttctaacagataagggctcattttgttacaaaactaccatggtctgttaccacacttaacattaagtcattctttttgttttttgtttgtttgtttgagacaggatcttactctgtcgcccaggctagcattcagtagcgttcatagctcactgcagcctgaaactcctggacccaagcaatcctcccaccccagcctcctgactagctgagactacaagtgtgcatcatcatgactggcaaattttttacttttatttttgtagagatggggtcttgctgtgtaggtccagactagtctcaaactcctcagctcaagcaatcctcccgtctcagcgtgggaaagtgcagggattacagatgtgagctaccatgcccggccaacaatcattctttaatgtcatctgatgcccagttcatgttcaaatatccctgactttctcacagatgtctctctccctgtgggcgtttgagtttggaacttctaagta[131 bp omitted]aaaacccatctctactagaaatatataaattagctgggcatggtggcggccgcctgtaatcccagctacttgggaggctgaggtaggagaatcacgtgaacccaggaggcggaggttgcagtgagctgagatcgcaccattgcactccagcctgggagacaagagcaagactccatctcaaaaaaaaaaaagaaagaagggccagtaagagaaaaatcaggaatatgtgacatcagagatgctaggggagtctgtagaaggagcaagtgagcagtgtgctttggatttagcatcagggaagacgtgaccaggatgagaaagaaatatggaggagaagtccgggcgcagtggctcacgcctgtaatctcagcactttgggaggccgaggcgggcggatcacgaggtcaggagatcaagaccatcctggctaacacagtgaaaccccatctctactaaaaatacaaaaaaattagccaggcgtggtggcaggcgcatgtagtcccagctactcgggagcctgaggcaggagaatggcgtgaatccaggaggcggaccttgcagtgagcagagatcgcgccactgcactccagcctgggtgacagagcaagactctgtctcaaacaaaaaaaaaaaaaagaaagaaagaaatatggaggagatgtggtgagtgagatgtggtaaaaaaattttttttctttgagacagagccttgctctgttactcaggctggagtgcagtggcgtgatcttggcttactacagcctctacctcctgggctcaagtgatcctcccacctcagactcccaggtagctgggactacaggcactcaccaccacacccggctaactttttgtattttttgtagagatgagctttcaccatgttgcccaggctggtcttgaatgcctaggctcagaccacctcggcctcccaaagtggactccaaataggtgccactgttgtggcaccagcccaaggactcagttgagaccctaattgaatgaattaaagatgttgacacatccataatcccagcactttgggaggcca[134 bp omitted]agattgaggcgggagaatagcgtgaacccaggaggcggagcttgcagtgagctgagatcatgccactgcactccagcctgggtgacagagcaagactcagtctcaaaaaaaaaaaatgaaaaaatgttctagaactagagtggtgatggttacacaacactgtaaatgcacagaatgccactaaactgctgaactatacactttgaaatgctctattttaccacaaactttttttttaaagcaataggaggaaaagaattagctgatggggcagagggagacagacgtcccctcctagaggattctgggtaggggttgaactgccccagctcctcccgaacccctttccaaactgtctctacctcccccaggcctggctggacacccaggaccggtgcttgggccactatgtgaatgggaagtggttaaagcctgaacacagaaattcagtgccttgccaggatcccatcacaggtacgagatgtcccccagtcattagtggaagggaggtatctgtgccctctagccctacccaccaacacccattccccttgcctagggccctgagggcaggaaacagctggtggtgggagatgggctgcgatgtctggttccttctgaaaccagtcaccctaattatggttccgggtctctgtggaggctttgtgagactgctgtctgttaaaatagcttccttgccctggaggtgatcatagccgtgacccagcagagaatggggaccagctttacactcttgggctgatccaggctccgaaaatctcagccccctccagatatgacatgggctactcctcccatctgagtccccccacttttctccccaggagagaacttggccagttgcctgcaggcacaggccgaggatgtggctgcagccgtggaggcagccaggatggcatttaagggctggagtgcgcaccccggcgtcgtccgggcccagcacctgaccaggtgatgcagctgaggtgtggaccccgggaggcggggaaccccagcatccactcgagaccatgggaacaaaggctatttcccaagatcccactgaattaatttgcagctaaggctcagattcccagtatgtgctggaggcagtcgtggctgaaacatgcatccgttgtccactattcactgggactagaagccacaaagcctctatttcccaggacattcttggagtgcattggggctcagttcactggggctggtgaagcccctaaatccatttcctagccgcttgcggggaagctagagacaaaaattccatttcccaaaacgcaattgaggttagaagctaagactcaatttcccaaaagcttcagggatttccggcggccaagacctttacacagcatcctcagggtttgtgtttccatgactataattctcataaatcttcactgccctctgccccaggtaaatggtggggatgcctcaggggctcatggggattgtagtccaggtatataggagcagcccaggactctgcaaggctgagggccgttggaaaatgagcaccctcttgctttctcgacaggctggccgaggtgatccagaagcaccagcggctgctgtggaccctggaatccctggtgactgggcgggctgttcgagaggttcgagacggggacgtccagctggcccagcagctgctccactaccatgcaatccaggcatccacccaggaggaggcactggcaggctgggagcccatgggtgagaccctggagtccctagccctatcctcccacatgactcagcagtgctagctccagtcccctcattctttttcttttagacagagtttcgctcttgtcgcccaggccggagtgcagtggcgcaatcttggctcactataacctccgcctcccgggttcaagtgattctcctgcctcagcctcctgagtagctggaattacaggcacccaccaccacacctggctaattgttatatttttattagagaagaggggtctcatcatgttggtcaggctggtctcaaactcctaacctcagatgattcacctgccttggcatcccaaagtgctgggattacaggcatgagccaccgtgcccggtcccctcattctttttcttttgtttttgtttttgtttttttctttttcagacagggtctttctctgtcaccctggctggagtacagtggtgcaattatagctcactgatacctcgacctcctgggctcaaaatcctcccacctcagcctcccaagtaactgggactacgaccatgcaccaccacacctgactagtttttgtttttgttttttttttttttgagatggagtttcgctctttgttgcccaggctggagtgcagtggtgcgatctcggctcactggaacctccgcctcccgtgttcaagtgattctcctgcctcagcctcccgagtagctgggactacaggcatgcaccaccacgcctggctaattttgtgtttttagtggagatggggtttttccatgttggtcaggctggtctcgaacttcccacctcaggtgatccgcccacctcgacctcccaaagtgctgagattacaggcgtgagccaccacacccggccatttttttttttttttcctaatgtagccatggggtcttgccatgtggcccaggctggacttaaacacctagcctcaagggatcctcttgcctcatttttttcttgcaggagtaattggcctcatcctgccacccacattctccttccttgagatgatgtggaggatttgccctgccctggctgtgggtaaatgatggcctggggggtcctgactcttgggtctgagaaaggaggggatcgtggggcccaaactccagagtctgagagacaagggggctggaggcctggactctgtggaaggagtctgtgggaggaggggctgcgggtctgaactcctaggtctgagggaggaggagctggagtctggactcctgagtctgagggaggaggagctggagtctggactcctgagtctgagggaggaggggctggagtctggactcctgggtctgagggaggaggggctggggtctggattcctgggtctgagggaggaggggctggggtctggactcctgggtgtgagggaggaggggctggggtctggactcctgggtctgagggaggaggggctgggacctggactcctgggtctgagggaggaggggctgggacctggactcctgggtctgagggaggaggggctggagtctggactcctgggtctgagggaggaggggctggagtctggactcctgggtctgagggaggaggggctgggcctggactccggggtctgagggaggaggggctgggggcctggactcctgagtctgagggaggaggggctggagtctggactcctgggtctgagggaggaggggctgggggtccagattcctgggtctgagggaggaggggctgggcctggactcctgggcctttgagctgccccacttccccaggctgcaccgtggtggccctcgtgcccccggcctccccggcgcccctcctcctggcccagctggcgggggagctgggccccttcccgggaatcctgaatgtcctcagtggccctgcgtccctggtgcccatcctggcctcccagcctggaatccggaaggtggccttctgcggagccccggaggtaccttcgggacaggggtcgtggcggaacgcggctgggggccgcaaggctcctcctgcggctgaactggggggggtccctaggaagggcgtgcccttcgacggagcctggcgggagagtgtgcggagctgggcctggcgctggggacggagtcgctgctgctgctgacggacacggcggacgtagactcggccgtggagggtgtcgtggacgccgcctggtccgaccgcggcccggtgagacccgtgcgctcccgtctcctcataccctggaggccgttggtgtctgtctccagtcttcggggtcccgagtctctgttcattttattttattttattttatttattttgagacggagtttcactcttgtcgcccaggctggggtgcagcggcgcgattttggctcaccgcaacctctgcctcccaggttcagcctgggagtagctgcctcagcctcccgagtagctgggattacaggcgggcaccaccatgcctggctaatttatgtatttttagtagagacggggtttcaccatgttggccaggctggtctcgaactcctgacctcaggtgatccgcccacctcggcctcccaaagtgctgggactgcaggtgtgagccaccgcatccggcctctctgttctttaggactctgttgatttatctgagtgtccatgtccctagttttccagcctctgtcttcactcttcagatcaccaacttgctagagtgcaatggtgtgatctcctgatgccccttttcctcacagggtggcctcaggctcctcatccaggagtctgtgtgggatgaagccatgagacggctgcaggagcggatggggcggcttcggagtggccgagggctggatggggccgtggacatgggggcccggggggctgccgcatgtgacctggtccagcgctttgtgcgtgaggcccagagccagggtgcacaggtgaggcagggggtagagacttgagggtgtcaggggaggaggggcctggagacccagctcctgggtccaagggaggagggagctgggcgtggacaactgggtccgaggaaggaggggctgggagcctggactcctgggtctgaaggaggaggggctgggcctggactcctgggtctgagggaggaggtgctggggcctggattcctgggtctgagggaggaggggctggggcctggactcctgggtctgagggaggaggggctgggcctggactcctgggtctgagggaggaggtgctggggcccggattcctgggtctgagggaggaggggctggggcccggattcctgggtctgagggaggaggggctgggggtccagactcctgggtctgagggaggaggggctggcggcctggactcctgggtctgagggaggagaggctgggggtccagactcctgggtctgagggaggaggggctgggggcctggactcctgggtctgagggaggaggggctgggcctggactcctgggtctgagggaggaggtgctggggcctggattcctgggtctgagggaggaggggctggggcctggactcctgggtctgagggaggaggggctgggggtccagattcctgggtctgagggaggaggggctgggggcctggactcctgggtctgagggaggagaggctgggggtccagactcctgggtctgagggaggaggggctgggggcctggactcctgggtctgagggaggaggggctgggcctggactcctgggtctgagggaggaggtgctggggcctggattcctgggtctgagggaggaggggctggggcctggactcctgggtctgagggaggaggggctgggggtccagactcctgggtctgagggaggaggggctgggggcctggactcctgggtctgagggaggagaggctgggggtccagactcctgggtctgagggaggaggggctgggggcctggactcctgggtctgagggaggaggggctggggtcctgcagtcctcggtctcagcaggaagggaccagaagtcgacttctagatcatttctctccctaggtgttccaggctggtgatgtgccttcggaacgcccattctatcccccaaccttggtctccaacctgcccccagcctccccatgtgcccaggtggaggtgagacccttaaggctgcagagctcctacccaccgccagccaagggcagcagctctgtgcctggggaagcccttggggtaaccatgtgacctgggcgtgggggctgctgcctgctctaggctccttccctggtgggtgggccctggagggctgagcctcccggtcaccccttgcaggtgccgtggcctgtggtcgtggcctcccccttccgcacagccaaggaggcactgttggtggccaacgggacgccccgcgggggcagcgccagtgtgtggagcgagaggctggggcaggcgctggagctgggctatgggtcagtctgcgtggcccgggcgctcactcctctcctcattcttccatcttcatctcccttctccctgggtcgctccccgcgcctttaactcacccctctcccggcctgccaccgtctgttttcctctgttggacaccttcatcttccccacaggctccaggtgggcactgtctggatcaacgcccacggcctcagagacccttcggtgcccacaggcggctgcaaggagagtgggtgttcctggcacgggggcccagacgtgagtacatcccctccccgtcaccagcccccccgccgccccatgcccttgacactcgcatccggcctcgcgtgccccttgcatcctcttgacaccgtccctctcacaggggctgtatgagtatctgcggccctcagggacccctgcccggctgtcctgcctctccaagaacctgaactatgacacctttggcctcgctgttccctcaaccctgccggctgggcctgaaatagggcccaggtgagtcgttgggggccagtggtctgggagtgtgaacggggagaggggaattgatgcctgtttccccgtggactggagggctggcgcgaggtccatccaaaccatctcttagtcctgctgagtaccacgttgtggcctcacactttccctaccccaggcctgccgagactctcagctctgccccatgaatgtctgtactctcccagaaactcatgggtctaggagcttggggtcccccagaggttcactggagcagaagcttggggtccctcagaggctcatgggagcaggagcttggggtcccccagaggctcatgggagcagaaacttggggtcctccagaggctcatgggagcaggagtttgaggtccccccagagactcaagggagcagtttagggtctaccagaggctcatgggagcaggagcttagggtcccccagaggctcatggagcaggaacttagggtcctccagaggctcatgggagcagaagctttgggtcctccggggctcatgggaacaggaatttggggtgccccacaggcttatgagagcagtttagggtctgccagaggctcatgggagtaggagtttagggtcccccagaggctcatgggagcaggagtttagggtacccagaggctagtgggaacaggggtttggggtcccccagaggctcatgggagcagaaacttgagtcatccagaggctcatgggagcaggaatttggggttccccagaggctcatgggagcagtttaaggtcccccagaggctcatgggagctggagtttagggtcccccagtgaatcatgggagcaggagttttagggtcccccagaggctcatgggaacaggggtttggggtgccccagaggctcacgggagccaaggcagtcttcccagtgcggtagagcatagggtctgagcagattgaggccccaggactcctcctcatgtcccaccctactccagcccagcacccccctatgggctcttcgttgggggccgtttccaggctcctggggcccgaagctccaggcccatccgggattcgtctggcaacctccatggctacgtggctgagggtggagccaaggacatccgaggtgctgtggaggccgctcaccaggctttccctgggtaaggggtcacacgggaaagcccaagggtcatggtgtggcagagaggggagcctgcccacagcaattggtggactgggaggctgggcccccagggtaggggctgtggacagaggtggggtgtcaggagagccaagaccaggatgccaacccccactgtgcgctgtctgcccacagctgggcgggccagtccccaggagcccgggcagccctgctgtgggccctggcggctgcactggagcgccggaagtctaccctggcctcgaggctggagaggcagggagcggagctcaaggctgcggaggcggaggtggagctgagcgcaagacgacttcgggcgtggggggcccgggtgcaggcccaaggccacaccctgcaggtgaagggtctgtgggcacctgggccagctgggcaggcggggtggggctcagaccagaggctgtgagataacccaggcttggaattcgggcccagccccaccgccttccacggcaggatcatcagcaagtggcttcacctctccctacctcagttccctcatctgtacagtgagtgggcacacaacccgcctcgtagagtagcgttcgccagatgatggatagcgacccattcctggaccctaaaatcaatttagtgggctgttaggcggttctcacattgctgtaaagaaacacctgggggcgcagtggctcacgcctgtaatcccagtacttcgcgaggctgaggcaggcggatcacgaggtcaggagatcgagaccagcctgggcaacacggtgaaacctggtctctactaaaaatacaaaaaattagctgggtacggtggtgggcacctatagtcccagctacttaggaggctgaggcaggaaaattgcttgaacccaggaggcagtggttgcagtgagccgagatcgtgccactgcactccagcctgagtgacagagtgagaccttgtgtcacaaaaaaaaacaaaaaacaaaaaatacctggccagacatggtggctcacgcctgtaatcctagcactttgggaggcaaaagtgggtggatcgcttgaggccaggagtttgaaaccagcctgggcaacacagtgaaaccctgtctccacaaaaaatagataaattagctgggcatgttggcaccagtctccctctggcacccggctggagtgcagtgccacaatcatggctcactgcagcctcaacctccgaggtccaagtgagccccccacctcagcctcctgagtatctgggatcacaggcacacaccagcacacatgactgggtgtttttgtatttttgcagagacaagagactcgccatgttgcccaggctgatcttgaactcctagcttcaagtgatccgcctgtcttgacctcccaaagtgctgggattataggcgtgagccactgcgcctggccagggattacatttcaacatgagattt[161 bp omitted]ccccagccttccgagtggctgggactacaggtgcccaccaccacacc[132 bp omitted]cccggccttcttttttttaaattttattttactttagttctgggatacatgtgcagaacgcgcaggcttgttacatagggatacacgtgccatggtggtttgctgcacctattgacctgccctctaagttccctccccttgcctcccaccccccaacaccatatttatttttaacaaaagaaaatagaccaggcgcagtggctcacgcctgtaatctcagcactttgcgaggccaaggtgggcagatcacaaggtcaagagatcgagaccatcctggctaacacagtgaaaccccgtctctactaaatatacaaaaaaaaaaaattagccgggcatggtggcaggtgcctgtagtctcagctactcaggagactgaggcaggagaatggcgtgaacccgggaggcggaggttgcagtgagccaagatcgcaccactgcactctagccagggcgacagagtgagagtccgtctcaaaaaaaaaaaaaaagaaaggcggttatgcaggatgtttctcaccgcccgaacccccgtggaatgattcactttgaccagcgtctgcgaaatggcaggggcttccacaatggtgcggtttgggccaacaccaagtgttggggagaatgtagaggaactggatctctcatttactgcgggcggggctcccctgccccacacgtgacccacctgtccctgcaggtagccgggctgagaggccctgtgctgcgcctgcgggagccgctgggtgtgctggctgtggtgtgtccggacgagtggcccctgcttgccttcgtgtccctgctggctcccgccctggcctacggcaacactgtggtcatggtgcccagtgcggcctgtcctctgctggccctggaggtctgccaggtatagccccctgccttcctgcctctcctccccgtagcctcagggcagcagaaaaaggcgccccaaagtcggcaggagcttgtctcttaccccaccctccgtggtacccatgctgcccccagccccagcacccaaaccttcactccttggggacccagtgcccattcttcaccctaggcctggggctttctcctccatgaccccccatccccttccctcccatgggcaccccctgaatgcccactccttgccctgcccccacggcctccccaacctttcactctctctatcccctaggacatggccaccgtgttcccagcaggcctggccaacgtggtgacaggagaccgggaccatctgacccgctgcctggccttgcaccaagacgtccaggccatgtggtatttcggatcagcccaggtgctctttgttctgttttgccatcttcagcatctcaaacttcaaacaggctcctccttttctggaaacacagccccgccctcttagaactcctgttggtaaggggagaaactccttgacaagaaggttttgaggccccgcccttaggactcaagttactaaggaagaggctgtccttagcaacaggggcctgagagctgcctagcccaaagacctcgtctcaggggacagcccgttgctaaggaccacaccctagatttggaggcccacagtctacgctttgtttttctattttgagacagaacctcaccctgtcacccagatgcaatcatacctcactgcagccgcaacctcccaggctcaagccaccgtcccacctcagcttcctgagtagctgggaccacaggcgtgcaccaccatgcccagctaatttttttcttttgcagagactggggtttctctatgttggccaggctgatcttgaactcctgggctcaagtgatctgcccgcctcggcctctcaaagtgctgggattacaggtgtgagccagcacaactggttgagtctactgtttttttttttattttattttattttattttattttttttgagacagagtctcactctgtcgcccaggctggaatacagtggcacgatcttggctcactgcaacctctgcctcccgggttcaagtgattctcctgcctcccaagtagctgagactacaggcactcaccgccatgcccagctaattgttgggggtttttttttagtagagatggggtttcgccatattggccaggctggtctcgaactcctgacctcgcgtgatctgcctgcctcagcctcccaaaatgctgagattacaggcgtgagccactgtgcccaaccaatttttactttttaaatggagacggggtctcgccatattgtccaggctggtctcaaactcctgaactcaagcgatcctcccgcctcagccaccccaagtgctgggattacaggagcgagtcaccgcgccccaccgtccactctcttaaacctcctgttggtaacagatgtgaacttgttgacaagagccttggggcccattcctttcaacatgggctgttaagggagaggaaattccctaaccactgggtccagtgcttttccctaccatctggaagttctgcttgggaggagctgggcattgtagctgcagagcctgggtccagcctgaagcccctcgtcagtaacagtcttcatcgcggaggaagcaggtgctcagcaacaagcctgcagaagtgcttacccccgtctcttcctcccctcagggttcccagtttgtcgagtgggcctcggcaggaaacctcaaaccggtgtgggcgagcaggggctgcccgcgggcctgggaccaggaggccgagggggcaggcccagagctggggctgcgagtggcgcggaccaaggccctgtggctgcctatgggggactgatgcctgagcgccacctactgcattttggacacctcacaccaaggggagatgcaccccacagacacctgggactttccccttctggttcctgtgtctcccaataaactctctgaccaaccctagctgtgcttctgcgagaagaaagggtgtagcaacttctggcagatatgaggcttttttcttttttttttttttttttgagacaacgtctggctctgtcacccaggctggagcgcagtggcacaatctcggcccactgcagcctcgacctctggggctcaagggatcctcatgcctcagcctcatatgtagctggggccacagacatgcaccaccacacctggctcgaggccattttagttctgaggttgagcagctcaggagccggctccagcacggtgctgtgtttgtgaaacagagaaaggggacccccgaggaccccagacagggccttaggactctcatatcttcttgtcttctccatctggtggctcttgctctctggttttctctaccttttcatggccccagaatccatatgcagtaaaggaactctctggaataaaattaaagtcctcctatatgacttttgtcaatttccatgatgtaaatgctcccaccgtgccggatttcaaggtacaggtgattaaacaactgcctgcgagatcctgaattgttaacaggtcagctcccatgagccaatacgagccgcttcagcacaccactgccttaggattctggttgtgggtgggtttttttggtttgttttttgttttttcgagacagagtctctctgtcggccaggctggagtgcagcggggtgatctcggctcactgcaacctccgcctcccaggttcgagcgattctcctgcctcggcctccagagtagctagaattacaggctcgcgccaccacacccagataattttttgtatttttagtacagacggggtttcaccatcttggcctggctggtttcaaactcctgacctcaagcggtccgcctgtcttggtctccccaaagtgctaagattacagacttaagccactgcgcacgactgttgatttttaaataaaggatcttgctctgttttttaggctgtaatacagtggcgcagtcacagcttactgaacccaccctcgacctgggctcaatcctcccacctcggccgggcgtggtggctcacgcctataatcccagcactttgggaggcc[135 bp omitted]gaggcagaagaatggcgtgaacccgggaggtggagcttgcagtgagccgagatcgagccactgcactccagcctgggcgaaagagtgagactccgtctcaaaaaaaaaaaaaaaaaatcctcccacctcagcctcctgagcagctgggaccacaggcacgcaccaccatgcctggctaatttttttttttttaataggcagagtctacctacgttgctcaggctggtcttgaactcctggcctcaagcgatcctctcgcctcagcctttcaaagtgtgggactgcaggcatcagccaccacacctgaagtagaattctttttgatgtaagaaacccactcttactagtttaggataaaagggagttttcagaggccaggctcggtgactcaggcctgtaatcccaacactttgggaggccgaagtaggcggatcacctgaggtcaggagtttgagagcagcctggccaacacagtgaaaccctgtctgtactaaaaatacaaaaattagctgggtgtggtggcgggcacctgtaatcccaattactcaggaggctgaggcagaagaatcactcgaacccaggaggcagaggttgcagtgagctgagagcacacacttcactctagtctgggcaacagagcaaggctccatc[131 bp omitted]aatcccgtctctactaaaattataaaaattagccaggcgtggtggcggcacctgaaatcccagctatctgggaggcaggagaattgcttgaacctgggaggcagagggggagcttgcagtgagccaagatcgtgccactgcactccagcctgggcaacacagcgagactcggtctcaaaaaaaaaagagagagagagaggagtcttctggaaggctacagagattccctagaggcaatagggcgatagggcaggacacacattgaggggccccaggacttggtcaggaaggagctagagcaggtcctttgtccatgggccacatgagctattggggcttgtatctctgcctctctgcttcatttaaatctttctagccagatggaaggtctgaccattgggtgcgacaaggcagctaacccaggctgaacaggaagtgaggcaggcagagggatcagggaagggaaatggatgatgaaggccaggacgggcgaggctttgctgcagtaacacataacccccgaatctgcgtgggccacaaccacaacattagtttgttgcttacactccctgtgctcatccggggctggcaggatccctgtgctcctccgagtggcacaggaaacttggctgatagaggcgctctctccatgcatcctccaccatccactccccggtcccttagacttccattcagaagtgacacctgtcacctccaccctcatgtgactggccaaagtgagtgtggccatgtccgagttccccaggatgggacctcgaatcctcctgctgggggggtgggggcagcagatgtttcaggacagtctgccacggatcagatgggtgagcaagagattcaggatgggcgtgatgggtcacacctgtaatcccagcattttgggaggccgaggcaggctgatcacctgaggtcaggagttcgagatcagcctggccaacatagtgaaacctcgtctctactaaaaatacaaaaattagccgggcatggtggcacgcacctgcaattccagctacttgggagcctgaggcacaagaattgcttaagcccaggaggcggaggttgccgtgagccgagactgtgccactgcactccagcctgggcaacagagtgagaccccatctaaaaaaaaaaaatgcttcagagattcagagatccacagatgtggaagagagcttctattttgtctcatgtaccacctcacccctcagtttggagttggagaagccgaggcttagagaggtcaaggggctggccaagctcccacagtgataaagctagtgctagggcgacacctgccaggcccaatgtgacaagatgcatcctgagtcctgtgtgccaagccttggcggggcaaagttggggcccggaggacggtaagacacagcaactgcgagttcccagagacagatccgggttccagccccagctcaccatgcactgggcgtgccacccagggagtcagccccactgcagcccccgctgcggggcgtccggagaacgcgccatctgcggcgtgagcggccgcctctcaccaccagggggcgcgctccgcctgggcccagattccaccccttgactgtctccccccaaaaatttcctttcactttcggtctctggctgtcacccggcttggccccttccacacccaactggggcaagcctggtgcgtgaggagacttggactctaggtccccaaggggcggagccagggtccccactcctggggcagggggagcagagggtggggggctgggttcccgggtccctaacctggggagggttctggggaccagacgtcgaggttcttagaagtggagatgaagagttttcaccgtaactggggcagacgcaggaagcctgggggaggaaggggcggaaactcagccacatcaatgggacgcgggaggggcggggaggcaaaggggcgggcagggcaggggctggggcatgagggtccgagacttgttcttctgtcccttccaagacccggcgacaggaggcatgaggggcccccggccgaaatgacagtgctggcgccagcctggagcccaacagtgcgtaaaccccagggacaagatcaggggagaggggaggcacaatgtcaggatggggcagagatgaggggagatggacgggagaacagatggacagatgacgaggaaataggaggggagatggacagatgtgaggggagatggataggagaggagacggacagaggagggggagatggacagaggatggggagatggacagaggagggggagatagaggagagggagatagagaggagtgggagatggacaggagcggggagatggacagaggagggggagatggacagaggagagggcagatgaacagaggagagggagataaagaggagggaggtggacaggaggagggagatggacagagaagggggagatggacagaggtgggggagatggacaggagggaagatggagaggagggggtatggacagaggagaggggagatggacaggagggggagatggacagaggagagggagatgaagaggagggggaggtggacaggaggagggagacggacagaggagaggaagagagacagaggaggggggagatggacagaggagggggagatggacagaaaaggggggagatggacagaggagagggaaggtggacagagccaagaacaaatgaagaggacgtggaccaagatcaagagagaagcaggcaacagtggtgtagaaggcagagggagggacagagctggaggaacccgggcgaggaaaccagacgtgaagatgaggtggttggagagagaccagcagagtgggggagatggggagagagaggggtggggcagagggggatgcaaactggacagcattggaccagaggcagagagaaaccgggaaagacaggcagagatggggccatgtctccagaaagtgtggaagaggcagaaggacacccagggaaggaggagcggggaagacagaacagtacaggtgggaagcccggaggagggggctgtgtgtggaacagcagagggctcccccagcacccgctcccctgcagacctatctcctcctgctgctgctgctgagctcgggactcagtgggacccaggactgctccttccaacacagccccatctcctccgacttcgctgtcaaaatccgtgagctggtgagcggcgctgccccggaccccctcatgtgatcccccttccccccacttttttttttaagtagagatggggtctctctccctgtgtttcccagggtggtcttgaactcctgggctcaagcgatcctcccaccttggcctcccaaagtgctggaattacaggcgtgagccactgtgcttaggggtgtcatccctttttaagggcaaggttctgtggcttcttctgggctccccctctcttggtcttgtccctctctctctggatctctgctgccacctctgggtccccacagttctgtttctcgctgttttcagccaggcctgatcctgttttctcccgcagtctgactacctgcttcaagattacccagtcaccgtggcctccaacctgcaggacgtaagtcatgttgggagggacctgggatggaggtggggaccacagactcaagatgctccaccgaggcgagtggataaccaggccctcccctccccaaacccaggaatcagagtcctcagcccctcctccctcagacccaggagccccggcccagcccctcctccctcagacccagcagccccgtgcccagctcctccctcagacccgtgggttctcccctctaggaggagctctgcgggggcctctggcggctggtcctggcacagcgctggatggagcggctcaagactgtcgctgggtccaagatgcaaggcttgctggagcgcgtgaacacggagatacactttgtcaccaaatgtgcctttcaggtcagccctcaacttaggggacaagtgaggggagggagatgccttcctacgaattagaagtaaagctccactaggccttattggcgatttggaccatagccacccaacgaaggtagagcgagaagcgccaccctgcagagccctgttcctacagaacaacacgtccccaggcaccggtgatggggagcagtctggtcccattctggggccccggtttcctaggccatgatgaagggtgccactgaggggttcttcccccaaaaaaaaacagggagagaaggggtctctaaactgaggaggccgggcgtggtggctcactcctgtaatcctagcactttgggaggctgaggtgggcggatcacttgaggtcaggagtttgagaccagcctggccaacatgatgaaatcccggctgtactaaaaatacaaaaattagccgggcatggtggctcaggaggctgaggcacaggaatcgcttgaacccgggagccagaggctgcagtgagccgagatcatgccactgcactccagcctgggagacagagtgaaactgtctcaaaaacaaaacaaacaaacaaaaacctctctctgagggctgggtgcagtggctcacacctgtaatcccagcactttcggaggccaaggtgggaggattatttgagcccaggagttcaagaccagcccgggtaacacagtgaaacctcatctctgcacaaaaataaaaataaattagccaggcatggtggtgcccacctgtggtcccagctactcagaaggctgaggtgggaggatcacttgagccctggaggtcgaggctgcgatgagctatgattgggccactgcactccagcttgagcgacagagcaagaccctgtctcaaaacatagaataggccgtgtatggtggctcacgactgtaatcccagcactttgggaggctgaggcgggtggattgcctgagctcaggagttcgagaccagcctcggcaacgtgatgaaaaccatctctactaaaatacaaaaacaaaattagccaggcatggtggtgggcacctgtagtcccagctacttgggagactgaggcaggagaattgcttgaacccaggaggcagaggttgcagtgagccgagatcacaccactgccctccagcctgggcgacaga[220 bp omitted]gaggcagaattccttgaacccgggaggtagaagttgcagtaagccgagatcgtgccactgtactccagccagggtgacagagcaagactctgtccccaaaaaataaataaataataaagtaactttgggaggccgaggcgggcgagtcacctgaggtcaggagttcgagaccagcctggccaacatagagaaaccccgtttctactaaaaaatataaataaataaataaataaataaataggctgggcacggtggctcacgcctgtaatcccacactttgggaggccgaggcgggcggatcacaaggtcaggagatcaagaccatcctggctaacacaatgaaaccccatctctactaaaaatacaaacaattagccgggcgtggtggcaggcgcctgtagtcccaactacctgggaggctgaggcaggtgaatggcgtgaaaccaggaggcggagcttgcagtgagccgagattgcgccactgtactccagcctgggcaacagagcgagactctgtcttaaaaataaataaataaataaatatggccaagcacggtggctcatgcctacaatcccagcactttgggaggccaaggtgggcagatcacctgaggtcaggagttcgagaccagcctggccaacatggagaaaccccgtctctactacaaatacaaaaaatagctgggcatggtggtgggcacctatagtcccaaccactgaggaggctgaggcaggagaatcacttgaacctgggaggcagaggttgcatttcaccactccagcctgggcaacagagtgagactctatctcaaaaaaaaattaattaattaaataaataaactctgagagccagagctcactgggccctgttgctgggcatcgccagcagggaagggcctttggcctgcggaggggcggtggggggatgacgtggtggtgacgtctccctcccctgctcccagcccccccccagctgtcttcgcttcgtccagaccaacatctcccgcctcctgcaggagacctccgagcagctggtggcgctgaagccctggatcactcgccagaacttctcccggtgcctggagctgcagtgtcagcccggtaaaggcttccaggcacccccactccttcccctcctgtcctcacggccgctcctcctctctgcacagtgcatcccagaccccatctttctcatattggttgtgacaagggcaagcttattcctctttctggagctcagtttaccaattttttttttttttttttgagacggagtctcgcactgtcgcccaggctggagtgcagtggcgtgatcttggctcactgcaagctccgcctctcgggttcatgccattctcctgcctcagcctcccaagtagctgggaccacaggcgcccgccaccacacccggctaattttttgtatttttagtagagacggggttttaccg[137 bp omitted]ctctgtcccccaggctggagtgcaggggtgctatctcggctcactgcaagctctgcctcctgggttcacgccattctcttgcctcagcctccccagcagctgggactacaggcgcctgccacctcacgc[255 bp omitted]cctcagccttccgagtacctgggattacagatgcgcataccatgcctggctagtttttgtgtttttagtagagatgggttttcaccatgttggccaggctggtcttgaactcctgacctcaagtgatccacccaccttggcctcccaaagtgctgggattataggcgtgagccaccgcgctcagcctattcactcatttaatttgtgacagtctgatgaggtaggtacaatgattatcctagttttacagatgagcaaactgaggcacagagaggccaagcagcccatccaaggtcacacagccagtggcagccaggcctctctttccttccttaccccagcccttctccttggtcacccagcctcctctttctccccagactcctcaaccctgccacccccatggagtccccggcccctggaggccacagccccgacagccccgcagccccctctgctcctcctactgctgctgcccgtgggcctcctgctgctggccgctgcctggtgcctgcactggcagaggacgcggcggaggacaccccgccctggggagcaggtgagcaggctgggaagagggggtgagggggccgagagggtggcccacttgtggctgacactttggggcccacaggtgccccccgtccccagtccccaggacctgctgcttgtggagcactgacctggccaaggcctcatcctggtgagtccttcctgggctatggggcctggactttgtgtctgcaggttgggagggtcactaggaggccatggaagggtggtgagcagt[156 bp omitted]tctactaaaaatacaaaaattaactgggcatagtggtgtgtgcctgtaatcccagctactcaggaggctgaggaaggagaattgcttgaacccaggaggcggaggttgcagtgagccgagattgcgccactggactccagcctgagtgacagagctagactccgtctcaaaaaaaaaaaaaaaaaagaaaaggaaagacccctctggggccacggagacagactggagaccaagccggaggctgtgggaaggcccagggtgaggaccatgactgagccagggctgggaccatgggatggagtggagtggatgggcagagagtcaggggtcagagatcaggagggaccggcctggggcctgacaggcttgagttggcacagatagccctggtccagtgatggggtggacaggggggaacctgggggaggagtcagattagggaaagacatggagctcactggggacctgaaggagcaaggggccctggggagatctgtggatgtgggagtttgcaagcctcctgggacaggaaggaaatggcattccagaaagagggaactgcctttggaagccctttggtatgagaaagctcagggtgttccagtaacttgggccagcgtggggcagcaaggagccatgggaggtgtgagagggaggaaaggagctgggaacaggtgtggagggtgcaggcaggtaggcaggtgggccaggagggaagaaggaggggaggccccagcgggtcccctaacatttcaaatctaacattttgtagtaattgctcgcacatatagtgccttggtaatgcaggcctcatgtggggctggcttgcttgctttatttttttttgagatggactctcactctgtcacccaggctggagtgcagtggcgggatcttggctcactgcaacctccacctcccaggttcaagcaattctcctgcctcagcctcccaagtagctgggattacaggcgcccgccaccatgcctggctaattttttgtatttttagtagagatggggtttcgccatgttggccaggctggtctcaaactcctgatctcagctgatccgcccgcctcagcctcccaaagtgctgggatgacaggtgtgagccactgttcctggcccatgctgggctttccacaaatgaactcacttccttgagaagttcgtgccattatgatcccaaggcatagagaggtaaataatttgccaaaagtcacacagctcaagggtgacaaccaagatttgacttcaggttgtcttttttttttttttgagatggagtcttgctctgtcgcccaggctgtagtgcagtggcatgatctcggctcactgcagcccccgcctcccaggttcaagtgattctcctgcctcagcctctggagtagctgggattacaggtacccaccaccacactcggctaatttttgtatttgtagtagagacggggtttcaccatgttggccaggctggtctcgaactcctgaccttagctgatccgcccgcctcagcctcccaaagtgctgggattacaggcatgagccaccacgcccggcctcgagtttgtcttgatccagcatctgtgcccttcactctgctgcctcagtttcctgatctgtacaaaaggctctaataatagtccttccaccatagggttgttatggggtgaagtgaagtgacacaggcaaggctcttagagcaacgcagtggaaacggcatgtgagccacctgtgcgattttcactttcctggtagccacattttttttttttttttcctgagatggagtctcactctgtcgccaggttgaagtgcagtggtgtgatctcagctcactgcaacctccacctcccgggttcaagcgattctcctgcttcagtctaccgagtagctgggattacaggcacgcgccatcacgcccggctaattttttgtgtttttagtagagacaaggtttcacca[139 bp omitted]ttatgcagtatatccaaaatgttgttatttcaacatgtaatcagtatttctcaatgattaatgagacattaatcagttggaatcattcatcattttgggatattttacattcttttgtcatactaagccttcagcatccaacgtatagtttatttatttatttatttttccttttgagatggattctcgctctgtcacccaggctggagtgcagtggcgcgatctcagctcactgcaacctcggactccctggttcaggcgattctcctgcctcagcctcccgagtacctgggattacgccaccacacccagctaatttttgtacttttagtagagaccgggtttcaccatgttggccaggatgatctccatcccctgacctcgtgatccgcccgcctcagcctcccaaagtgctggattacaagtgtaagccaccgcgcccagcccagacaataaatttttatcagaaatgcttcatctatatttaaatttcatgaaatttacagttgccaaaagtagactcacatagtcaagttgttcaaaacatacattaaaccagcctgggccacatggtgaaaccccatctctacaaaaaattttaaaaagtagctgggtgtggtggcacatgcctgcagtcccagctacttaggaggcaaagtaggaggattgcttgagcccaggaggtcgaggctgcagtgagccctgattgtgccactgcactccagcctgggtgagagagcaagaccctgtctcaaaaacaaaaaaaccacacagaagagtttagaatcccagttgctatctctgggaatcatcatgattgctaagaccggtatct[138 bp omitted]tggcacgatctcggctcactgcaacctccgcctcccgggttcaagtgattctcctgcctcagcctccccagtagcttggactacaggcgcgtgccaccacacccagctaatttttgtatttttagtagaggtagggtttcactatgtttgccaggattgtctcgatctcttgacctcgtgatctgcccgcctcagcctcccaaagtgctgggattataggcgtgagccaccacgcccagcctatctttttttttttttttaagaaaaggtaatacattgagcagttttcctcccaacctagtccctgtccaatctgtttcctgtcttaaatttattttttattataatttttttttttttttttttttgtgagacagacttttgctcttgttagccaggctggagtgcagtggtgctatcttgactcacggcaacctccacctcccaggttcaagcgattctcctgcctcagcctctggagtagcttggattacaagcgcctgccaccacgcccaactaatttagtgtatttttagtagagacggggtttcttttgttgttgttgttgtttttgagacggagtctcactctattgcccaggctggagtgcaacggcacgatctcggctcactgcaacatctgcctcccgggttcaagcgattctactgcctcagcctcctgagtagctgggattacaggcacacaccaccacacctggctaatttttgtatttttagtagagatggggtttcaccatattggccaggctgatctcgaactcctgacctcgtgatctgcccgccttgacctcccaaagtgataggattacagccatgagccgccctgcccaactaatacctgatattaattttattgtatctcacccagcatggtggctcacacctgtaactccttggcagatcgcttgagcctaagagttcaagaccagcttgggcaacatggtgaaaccccgtctctactaaaaatataaaaatgagctgggcatggtggcgtgcacccgtaatcccagctaactcaggaggctgaggcaggaagaatggcttgaacccgggaggcagaggctgcagtgagctgagatcatgccactgcattccagcctgaaacagagcaagactgtctcaaaagaagtttaagtccagcctcaaactcctggactcaagtgatcctcctgcctcagcctcctgagtagtgcaccggccccatctcaagtgttcagtattcacatgtggcttgttactcccgtattaaagagcaaaaatagagaacgtttctttttcttttttttctttttttttttttttttgagatgggagtttcgctcttgtcgcccaggctggagtgcaatggcacgatcttggctcaccgcaacctctgcctcccaggttcaagcgattctcctgcctcagcctcccaagtagctgggattacagacatgcaccaccatgcctagcaaattttgtttttgtttttgtttttttcttttgagacagacttttgcttttattgccaaggctggagtgcaatggtgcaatctcgactcactgcaacctccgcctcccgggttcaagcaattctcctgcctcagctaattttgtagttttagtagaaacggtttctccatgttagctaggctggtctcaaactcccaacctcaggtgatccgcccgcctcgacctcctaaagtgctggaattacaggcgtgagccactgtgcctggccctaattttgtatttttagtagagatggggtttctccctgttggtcaggctggtctcaaactcccaacctaaggtgatccaccagcctcagcctcccaaactgctgggattataggcatgagccaccgcgcccggggaaatatagggaacatttctatcatggccacgttctcttggacagcaatgccctagcacatagtaagcgcttgctgggaatggagttgttttgggcataaatctgtggcccgccccaagctaagctactttccctctcctctctcagcggagccttaaacaacgcagtgagacagacatctatcatcccattttacaggggaggatactgaggcacacagaggggagtcaccagccagaggatgcatagcctggacacagaggaagttggctagaggccggtcccttccttgggcccctctcattccctccccagaatggaggcaacgccagaatccagcaccggccccatttacccaactctgtacaaagcccttgtccccatgaaattgtatataaatcatccttttctaccagctctggccaggtctgtctatggatgggtgtgaatggggtagttttgatttcagaatcttggtttttgaattgcaatgcaatgtttcattcaatacgtgttttctgaggtcccctggagccccgggccggcgctgggcaatgtcagagcctggatttgagtcagaaccagcccaggtgccccaggtctccttggctatggacgagaagacaagggattcagcgagcctgggtgcaggatgccataggctactatggagataaaacagaggcagtgtgaggggcaactcacccaggcagggagagcagagaggctttccagagccaaatggcattgcgatggtgacaagccagatttggagggggtggggagggcatcctgggcaagggacccagctgaagcaaaggccgacagtccagaaagtgagaagttcctctgaggaacgctcagtggattggtgcagccaggcaactagaagccattccttgatccactcttagagcccctggggaagaccacctccatctgttttacagatggataaactgaggcccagataaggccaagggtttctccaggtcacagtgaagtcgaccagacacaggaatccaaatctctaagcctagaatgggcaaggctccggggctcacgccggtaatcccagcactttgggaggccgaaacgggaggatcgcttgagcccaggagttcgagatcagcctggccaacatgtcagactccccccgttcccgggccacaacaaaatatatatatatatatatattagccaggcatggtggcgcgcccctgtagtccaagttactcgagaggctgaggcaggaggatcccttgagcccaggaagtggaggctgcggtgagccatgatcgccccacagcactctggtgtggacaacacagcgagaccctgtctcacaaaataaagtaagcccggactgagtgcggaaaggcgggcctggcgggtctggtctccccatgcgggccaccagaggccctgcagccttcagtcgcttgaaggggtaatggcgcttccactcacaaacatggcggacagagcgtgtgaacgagatgaacagcccctcaaaaatatggccgccgaggctggacggccgtgccccagcagcaccgcctccgcgccccacgtgatctctcgccgggcacagcgctgaccgcggaggtccaaccggaagaatgtccggattggacattcggaagagggcccgccttccctggggaatctctgcgcacgcgcagaacgcttcgaccaatgaaaacacaggaagccgtccgcgcaaccgcgttgcgtcacttctgccgcccctgtttcaagggataagaaaccctgcgacaaaacctcctccttttccaagcggctgccgaagatggcggaggtgcaggtatgggctccgcgcgggccggggcggcaaggggccgggtgggatccaggccggaatggggtcgcaccctctctgtcttgcatgttttgcggagcttaacatccataatgaagcaaaatggaagtcttttgggataaggggaatctgtaggaaatgccgcggctctctttaggcctagggttggctacaatgtggcatttccttctcgaggcgagggtgatagagcttccagcacaggacaggtattttgcaactagattttgcttaccttgaactcgggtagtgggtgggggccctggggtagagtcttggccgaattggacccttgtgtgtcctcagcgatgaggaacacgcggaagtgtggccgggcggtctcggggcaatgagaaactgagttttggccaaaatggaaggtatttttatcccgctcagtgcgcgggctactttgatttcacgtggaggtgttaatcggggtcccctgcagctccggttcttttaattctcaatgcctttctgcggggggtcgagagctgttggctgcggggcactctggaatgaactcgttttccgtcgttttggggattggcgattgtcctgaggcgtgttactggaagtcgagagctgtgatgaatggttccacaaggatgggacatcttttgggcctgacacctgggggccctttccctggctcctggtgtagctacttaagtataaaggagggattggccctggaaaggtttctttgtgagtagtctgttgttggggcgggtgacatttcagagccaggccgatctaggcaagttgtgttcaccaagcatgtgtctttgtgcctagcacagttcgcaatgttttgcgtagttcagttaaccatattcctgaggcagttactggtatccttgttttacagaggaggaaattaaattggaattggtgattttgggccaaggtcacgacttcaggaagtctgtctggattttagagtctttgtaccaacgcttacaaagcatgtgtaacaaccagtgtgtgcttcatgcttttgcattaaaacaatgaggatttctacttttagtgttttttctgagacggagtctcgctgtgacacccaggctggagtgcaatggtgcgatcttggctcattgcaacctctgcttcccaagttcaagtgattctcctgcctcagcttcccgagtacctgggactgcaggtgcctgccacgacgcttggctaatttttgtgtttttagtagagacagggtttcaccatattggccaggatggtctcgaactcctgacctcaactgatctgcccacctaggcctctcaaagtgctgggattacaggcgtgagcccctgtgcccggccaggatttctactccggaggaagctgaggttcggtgcctgagcagtttaccggggaaagcagagtgctctatagcagagctagcatgggcttttgactactctgcctaatctcatcccacctgaaattcggttttcttccaaattaaatttgtggtagaaacatcctatacattagaagagaattagattgtgttaacatcctacaattgattggccacagtggctcaagcctgtaatccgagcattttggaaggccgaggcacacggttcacttgaagcgaggagtacaagagcagcctaggcaacatggcaaaaccctgactcaacaaaaaaaaaagtacaaaaattagctgcgtgtggtggtgcgcgcctgtagtcccagctactcatgaggctgaggtgggaggatagcttgatcctgggaggtcacaggatcacaggacagcctgtgcaacagcgagaccctgtctcaaaaccaaatcctacagtttattagttacaaggtcttgtaactgggtagtcagtgggcagagccttgctggtcttcgttcaaatccaattgctttgcaaaatacaatctgagcataaaatactcatagaagaactcagatatgaggggagtttgggcctcttaaactgctcactcactgatcctgaggcagccttgctttctcagtccctgttcctcatctgtagaacggggctccgtgcatagttcccagctctgatggctgggtgcaaggcacgctgttggcacggtaggacaaaagaagggaatgcttgcttgtgaggacaatcaaaggctgtccttgtctctgagtccttttgcccttgtctcccacaggtcctggtgcttgatggtcgaggccatctcctgggccgcctggcggccatcgtggctaaacaggtactgctgggtaagtcgctgctcgtggcccctctgtcatgggcccccgctggaggtcagtgatgagcaacattcaccatctttcgtttgagtctcacggccatgagatcaaccccatgcaccgctctgagacctgccagccactcttccccagggttggggactccaggctcaagaagtaattatgtattaggctagtttttcatttaaacaggaacttagctctggcaagtactgcgctgtgtctggagggtgactgcataggcagtggtgggaccctcaggcggctcggccctgctaagcctttccctccctctaggccggaaggtggtggtcgtacgctgtgaaggcatcaacatttctggcaatttctacagaaacaagtgtaagttaggacctgggaggagcactggagagggtctccctgtggggtgttgaggctctgaaagcaattgcagccgtgttgggagaggctacttggggtttctgagaaggcccttggaagtggggttttgggggtgctggtagactgggcaggcctcacactctcccctctccctagtgaagtacctggctttcctccgcaagcggatgaacaccaacccttcccgaggcccctaccacttccgggcccccagccgcatcttctggcggaccgtgcgaggtgagcagagcgtggggactgcaggtggtgacgggcaggcggccggtgatgagaacttctcccactcacattcgagtttcccgaccatgagatgactccacatgcactaccatctgaggccaccccatgggcccacctcagtggggtgggtgggcatccttatgaggccctctgactgggcctgctatctgtcacccaacaggtatgctgccccacaaaaccaagcgaggccaggccgctctggaccgtctcaaggtgtttgacggcatcccaccgccctacgacaaggtgagctatgccaaaccccacaggcagcggccttacctgtggcgtccatgatgttccgcaactacctacattgtttgatcctcatgaaagcagcactggctgagacgccagtccagccgacctccttccctgtctgtccctcccgggctcttaagcccctctctttctctaacagaaaaagcggatggtggttcctgctgccctcaaggtcgtgcgtctgaagcctacaagaaaggtgagtcccagcttacgctgcaccatctacttgggagatttcaggcctgctgagggacctggggacctggagcctggcagatgatgtccttatctcacgatggtctgcggatgtccctgtgggaatggcgacaatgccaatggcttagctgatgccaggaggcttgggtgggtgcttttctaacaggcctgcagagaacagttgcattatgatatgcccagctgtcagtcacctcccagctctcaacagctccggctcttcagggtgtgggggcttagatatccttacaacttcatttgttcaccccccccccccccccccgcagtttgcctatctggggcgcctggctcacgaggttggctggaagtaccaggcagtgacagccaccctggaggagaagaggaaagagaaagccaagatccactaccggaagaagaaacagctcatggtgaggccaggggctggtgctgaggggggcatctcactcctggacaggcctggcaggtgccttgctcacagagtactcttaactggcaaaggaccagccggggttggggtgggatgcagtccatgtaatgagggcaatgcaacccctcctgaccaccaccacctgcacttattcttggcagaggctacggaaacaggccgagaagaacgtggagaagaaaattgacaaatacacagaggtcctcaagacccacggactcctggtctgagcccaataaagactgttaattcctcatgcgttgcctgcccttcctccattgttgccctggaatgtacgggacccaggggcagcagcagtccaggtgccacaggcagccctgggacataggaagctgggagcaaggaaagggtcttagtcactgcctcccgaagttgcttgaaagcactcggagaattgtgcaggtgtcatttatctatgaccaataggaagagcaaccagttactatgagtgaaagggagccagaagactgattggagggccctatcttgtgagtggggcatctgttggactttccacctggtcatatactctgcagctgttagaatgtgcaagcacttggggacagcatgagcttgctgttgtacacagggtatttctagaagcagaaatagactgggaagatgcacaaccaaggggttacaggcatcgcccatgctcctcacctgtattttgtaatcagaaataaattgcttttaaagaaatctggcgtctttgcactgtgtctgctgtggaggcaggcccctggcaaatggggggtgaggagcttgaagagggtagaatgggctgtgctaatatacagaatatatgtaacttgctataaattgaatgatcctttatagacaccgtttacaaaccaaagacataaaatgtggccagcagtgcctggtgcttcctagttaatgtaaagctgtctcattctaattcagctgcaaagtatggacccatgccctgctgccaggctgctgtagtcccggcggtctgtagagactagcattttgcaaatgataagcactagaataacagataacgctaggctttatgcactaagagaacccattagatctgccagtctgaatcccagaaagggcactgatacagagcatttagtactaggtagcaatttcataaaatgtccctggtcaaagcttgctggagcaggccccgttcccattttactgatgtctagcagtcgtgttcagtaatacgtcatacccaggtctccacgctaaacagcctaaacactaaaagtaaacatgctgtgaagtaaaggaagctagattcatgctgtccttgcggttggatgccaagattcaggagtaactgtttgttacctgtatacttacatgtacaaccttaccccagagaaagatgagtggacagtgatgtgcattgtgttgatagcagattataacttgccacaccattccatcaggggcttattaacctttccagaagagtctgaagagaccgcagtggcttgtgttttccctgagaatcagtgaacatgggtggtgcctacccctgccagagtccccacatggattctcatccaccagagaagccgactccagaaataaccagacttagagcataatcttcaatttcaccaattccatgtgaaacggcacaattatcctccaaaagcatgatccattagcaaatgggaatgtgggctttataaaaatttttaagactgagaagacaccatcaggaaagacgagccacagactaggagaaaacatttacaagtcatctctttttgaaggtcttgtatcctgccataaagaactcttggccaagtgcagtggctcacgcctgtaatcccagcattttgggaggccaaggcgggtggatcaactgaggtcaggagttagagactagactggccaacatggtgaaaccccacctctactaaaaatacgaaaattagctggacgtggcgcagggcgcctgtaatcccagctagtcgggaggctgaggtaggagaatcacttgaacccgggaggcagaggttgcagtgagccgagattgcaccactgcactccagcctgggcgacagagcaagactccgtctcaaaaaaaaacaaaaacaaaaaacaaaaaaaactcttacaggatgtggtggctcacacctgtaaccccaaccatttgaagtgagaggactggcttgagtccaggagttggagtccagacagggcaacatagggagactctgagttaacaagaattttttttttttttttgagacagagtctggctctgtcgcccaggctggagtgcagtagcgcgatctcggctcactgcaagctccgccccccgggttcacgccattctcctgcctcagcctcccgagtagctgggactacaggtgcccgccaccgtgcctggctaattttttttatttttagtacagacggggtttcaccgt[134 bp omitted]cactaactgatacacaatacacaagccactaaccccacttgtggctcctgagcacttaaatatgaatagagtgaggctgggtgcagtctcacctgttcccggaactttgggaggccgaggctggagaatcacttgagcccaggatttcgagaccagtctgggtaatatagcgagaccttgtccctactaaaaataaaataaattagctgggcatggtgacacatgcctgtagtcccagctacttgcaaggctgaggtgggaggactacctgaggctggggaggtcgaggctgcagtgagctatgattgagccactgtactctagcctgggcgacagagagataccctag[197 bp omitted]ctgaggcaggagaatggcgtgaacccgggaggcggagcttgtagtgaaccgagatcgcaccactgccctccagcctgggtgacagagcgagactccgtccaaaaaaaaaaaaaaaaaaaaaccgtaatattcagctatagacttgtgctgttcaacacagtagcctttagccacatgtggctatttagatataacacaatcaaagttaaacatttatgtcctcagtcataaaagccacatttagagtgccagtgactaccgtgtccaccagcgcagatatagaaaatttccatcacataaagttctactagacgatcctgttatcttcagaaaaacggcagaaggatcgctccacgccaacccctggcaccaattaaatcatcgtctgcggatgaaatgaggagagagtagctttctttctctttttttttttttttgagacggtctcgctccgtcgcccaggctggaatgcagtggcgcaatgatagctcactgtagccacgacctccccagctcaagcgatcctcctccctcgacctcacaaagtgttgggattacaggcgaggcgcactgcactcggcgagagtaactttctttctttcttttttttttttttgagacggttttgctgttgttgcccagcctggagtgcaatggcgcgatctcggctcactgcaacctccgcctcccaggttcaagagattctcctgcctcagcctcctgagtagctgggattacaggcatgcgccaccatgcccgactaattttgtatttttagtagagacggcgtttct[143 bp omitted]tgtcgcccaggctgtctgtcggccaggctggagtgccatggcgcgatctcagctcactgcaaccttcgcctcccaggttcaagcgattctcctgcctc[134 bp omitted]tagcctcccaaagtgttgggattacaggcgtgagccaccgcgctaggccgagagtaactttcactgcacctctgaaagttcgtgggcagctcctgcccctaacaaagatggcgacgccgccacacatgctcctagcactccccggccgcccacccttcaaaaagatggcagccgcctcatccggtttgaaggctgaacgaacagagccacgcggtatccaaatcccacgggagcctacgccacgccgaaacaggatggactccgtacgactctcgcgataatacgggcgggctgaaggctggtcacatcttccctgcctaaataatcgcgcccggcgttgtggggcctaagactctcgcgagacaccgtctagcacttcccgcccgtcagtccttcacagtgcccgaatcgcccgctggtttaagtgcagcctgtcaatcagagcagctctcgaggccccgcccaaggccgtgctgcgtttctccttacgtcacttcctctccagcccctgcgtaatcgataaggaaacccggacgctgctgcccctttctttttttcaggcggccgggaagatggcggacattcaggtgcggactcggggttggatgccagggtgcggggtccgccttggccttcaggggcgcgtccgggagggcagagcccggcggccaagttcgggggttaattccgggcgtccgtgattattttctagagattaactggagtggagggcgcttgcttttgtttctagatgagtgcttcctaattcctgggggctcctggcgttaatggaggctcaagcgttttaggacttaccttcttaaaaaccaagtttaagaaggtttttttggagttctccggtcttcaggggtaattctgtggaaacggactcctaagggctaatccagggagcctgccgtctggtatttaattctgaatccttatgtactacataaggagtgaatcctgggtgggcgatcttgggtcttggagaatgatcctcgctgaaaggtgtccagggtgtgagagggttgatcctggtttagaggatgaattttgcaatccctgagaggccttctggagtatataaattgaaataacctcgggcttagatctgagtatgaattacaggtaaggtcagggtggtcatgtcttagagggtgattctggggcaccaggccttggacgccggcgctttgcaagtaaatgtagagcatggggtctgggaggttctgggaaggtctctagggctggttggctgccggcttcaaacttagcagctcatcagttttctcctcataatctgtagactgagcgtgcctaccaaaagcagccgaccatctttcaaaacaagaagagggtcctgctgggagaaactggcaaggagaagctcccgcggtactacaagaacatcggtctgggcttcaagacacccaaggaggtgcggggaacctcagaagaaagaaggggaacctggcgttcctgcacgtgtgcccacgacgagttgccctgcctgcatctaagtggcttctggggctgctgggaattgtagttgcttccctgaggccacgcccctggctcttttaaggaaccgcccgcccaaggctcactcctttatctttcctatcctttcaggctattgagggcacctacattgacaagaaatgccccttcactggtaatgtgtccattcgagggcggatcctctctggtaagtgcgggagttactggtgtctggggcctgaaatactgaaagaagggtcttggggcccagactcctgggtcctgggtgagaggggtggttaggaatgcaaacttgtaggtccaggtacattggcagatgatgtttgttttcacgatggtcttcagatgcccacgtgggcactgctgagaaagccacttggtaaaactgatgccggaaatggggctttttgggatccctgctcagctgcttctgagtcccagcatgccctgggttacctatggccctctttcccatgggacctgacctatgatcggcccccgctcctaggcgtggtgaccaagatgaagatgcagaggaccattgtcatccgccgagactatctgcactacatccgcaagtacaaccgcttcgagaagcgccacaagaacatgtctgtacacctgtccccctgcttcaggtgagcgcagtggcccatcaggttgctcaggccacgctctctcagccttcagattccagatcggaccaatttaaggccaactgagggagggaaagactgaggtggcatctctgggaagccccagaatctcaggatttgtatatcatatgttcttcagaatcaaagcgttctacagggtgaatatctctacctgaaatgcttggaaccagattttggaatgttctcgcatacatagtgagatgttttggggatgtgacataggtctaaacaagaagctcatttgtttcatatacaccttattcacatagcctgaaagtagtcttacgcagtgcgttttataattctgtgtgaaacaaagtttgcgtacattgaaccattggaaagcaaaggtgtcacgctggtattgaagaagtttcagattctagccaggcaccgtggctcaagccagtaatcccagcactgtaggaggctgaggcaggaggatcccttgagcccaggagtttgagaccagcctgggcaacatggcaaaaccctctctctacaaaaaatacaagtttgccaggtgtggtagcatgtgcctgtagtctcaggtcttcaggcggctggggtgggaggattgcttgagcccagaaagtggaggctgcagtgagccgagatggcagcactgctctccggcctgggcgacagagtaagaccctgtctctcccacacacacacaaattcagattttgcagcgtttcagaatttttggattagggtgctgaacctgtaataggcaggtgcgtttgaaccaaaaggttaggatgtcataccagatgggaacctcagaaatgttggaattaaacgtttgttcattccctcagcatgttttagttagagcttatcacgtaccaggtgtggtgtgagatgtttggggttcagtggtgagccaggaacaaagtcctgctccctcagagggcaccttcaagcagtgtgggtgccagatgacagccaagtataaccagaatggggatgtgggcagctgatattggtggccctctgggcggggaggatcttgggagcaaggtgaggagtcctgtgggtggagaggagggtggcccaaactgatgctgagcgataagggacctgtggttgtcagtgctgcaggatccccctgctgctctgctggggaagggtggtgaggctgctgacaacttgggggcctccagtttgcttgtgaaatggagctcgtccaccccagcggtcctcggaggggtggtggcctgctctgtgtacagcgttgagcttggtgcttggcacaaaacttgtacgaaaggaggggacaggttgaattggcgagtagagcttggttggggtttggtggagccgaagcagagagcctttagcctggtgaaggggagggagggcctcctggggtctgctggggtggcccctcctgaggacatggccctacctgcctccacagggacgtccagatcggtgacatcgtcacagtgggcgagtgccggcctctgagcaagacagtgcgcttcaacgtgctcaaggtcaccaaggctgccggcaccaagaagcagttccagaagttctgaggctggacatcggcccgctccccacaatgaaataaagttattttctcattcccaggccagacttgggatcttccgcgcctttaccagagcattggtgggggtgggggtgtgcctcggggaattgggcagagctgctgtcagagaggctgcctgcccatgtctgtgggtgaggacagtggagcctgaactgagatgcctgccttcccctgggtctccttctttggtccttgtcaccttttcggtgtctgaataaggctgattacctggcgttgcgctgtccccccgccccctccggtctctggggaggaagtgagtgacggcggaggcccctgggtcctccaggccctggtctgtctctttcctgaccacctcgggtggggaggggaagaagctgcagcccccccctgctgtgggcatgggctcacccaggtagagtgggatgtgctgaggccctgttgtctggctgtgaagtgtaaaggtcttggctttagcctgggcctcctatccctccttacagccaaggatgggggccccatgcacgcaccacacacgcctagttgggcaccaggcctatctgcagatgaggaaactcatctgggagaggccaagccctccacctgaagtcccagtgagtagctgagttacaggtctcagattctagaaacttcctctgcgccagctgcctcaaaatcgcagtaaggaaattggtggtgtgggcaagtggcatcatgaggctcccctggagcctgttcagtggtaccggggcccaggctgctgggaaggaagtgggcaggaagcgtccggagacggcccaacacacacaggccgcagagatgggggccttgagaggaacaggacaggacacacggtggcccagggttgtggcacatggggaggaggggttttgcagagctggggagagcacagaccaccgcgagaggcaggtacaatagaaacaggtgtactttgcgcatcacacagaggtggggacgacaggcatggggtgggggcggtgaggcaggagcgcaccagaggatatgtgggacccgaaggggagagacgcataaaagccgcagcagagatgggagtacagggaggggaggtcccaatgcccgctcacctcaccccttggggcctgccggtgccggggtccccaggtccctgtcccccaggcctgtaccagggtctgagcccagcactggtacaagggttgggagacagggccatggggagaggagccgccgctgccgctgctgcctcggggacgctgcctccccgtgggcccagtccctgccttatacccaggtccagggagggcgggggttcctgccagaggaagtggggccgcatcaaagagggcaggaaggggcagggacaggttggggggacgccaccctgagtcgcagaaactgcacacccactccaccctatgctgggggcagtagagaaccagcaaggggcaaagagggagtgtggactccagagggaggggacggagacccagaggggaataggaggttgcggccccctcccctcagccgcaggtgtttccgttcgggtggggctgctgtgtttacaacaacagcccggctccccggtttcctccctgattgttggggcgtctccttggcaccccatcacgtcaggtggtgtgctgaggtcagagtgtgtgctggggaaggacctctgctgggcctgctggattgcaaagagcaagtttaaaagaccccctcggacctcttgacaggccttccacctgaagagtggggataaggaccataggttctttttatttttttatttttattttattttattttatttttgaggcagattcttgctctgtcgcccaggctggagtgcaatggcgcgatcttggttcaccgcaaccttcgcctcccaagttaaagcgaatctcctgcctctgtctcctaagtagttgggattacaggcatgcaccaccacacccagctaattttttaatttttagtagagacggggtttcaccatgttggccaggctggtcacgaactcctgacctcatgatccacccatattggcctcccaaagtgctgggattttacaggcgtgagccactgcaccctgcccacaggttatttgataacccaaggagatacagttcctaggtcagcgggttcccctgtctcccctcccacctgctctccctctcactcagccccacacccccagcacccaccagacctgctgttcctctgagcctcctcaccatctgttccctctatgtggaatactctgacctggagtttccacctggctccctccctcactctctttgtctttaattaagtgaatgaattaatttttttatttgttaattgtttatgaagagaaactatttcttagcccatatattcatgtgtcatcgttcaggaacaagtcagtgacaaacttctaggtaattcaacctgaagaaattctttatattccaagatcattgcactctgaaagataccagccttccagccaggtgcagtggctcatgcctgtaatcccagcactttgggaggcc[132 bp omitted]gaggcaggagaatcgcttgaacccgggcagtagaggttgcagtgagctgagatcgcgccactgcactccagtctgggtgacagagtgagactccatctcaaaaaaaaaaaaaaaaagataccagccttcctcatctcaaaatctttcatggaatcgtaatttctgtagaaatctgcatatgccttctttcttggttcagccacagcaaacatatagaaagctgcagcccccagggataccatggatgcttcaacaatatgaaatcacagacgcttggccagaaggccacacatctgaggctttggcaaaactttggaagccatggtagttactgtccttgataacgtatgtcagcctcaataccaacgtccttcctgactgatggaaaaatggatggtgaaggaatgaattatgtgaagttgccacattctggctggggggaccttgacccctaggcttcaggggctcaataactggaagcagtaaagctgagccagaggccccagaggtagcagagacccgccgaggctcttttccaacttctggccctgtagctccctagctgtgtgtgaccttggacaagagacccactcctccaccacagagcctcagtttcctaatctgtaaaatggcttcttgcctccctgccctattgggaggatcaatatgctcatgtgagccaggtcccgtggctcacggctgtaatcccagcactttgggaggttgaggcaggcggatcacttgaggtcaggagttcaagaccatcctggccaatgtggcgaaaccatgtctctactaaaaatacaaaaattagccagtgtgatagcgcgcacctgtagtcccagctactcaggaggctaaggcaggagaatcgcttgaacctgggaggcagaggttgcagtgagccgagacagcactccacctaagcagcagagggcgactcagtctcaaaaaaaaacaatgctcgtgtgtgataatgggacagaaccagtcctgattaagtgtacactggaaagtaacaatgccgggggccctcagcttggtgttggagaaaggcccatagtgtcatgttacagcatcctgtggggccccttgggcaggcttaaggaccagggcctctggcaggcagcccttgctgtaatggacccacggtttttattttaatatttgttgtatggttgcggaatcctggctccattacagcaagccctggtagtttgtcacgggatgttgagtctgttttagcatgcctctggaatattctgtcgaatacctattatagggggccccaatggccttgccttttcacaggaaagttagcttttatagtggggttctgggtttataatgatagcggtcaggccaggtgccggggctcacacctgtaatcccactacttagggaagccagggcaggaggatcgcttgagccaggagttagagaccagcccgagcaacaaagggagactcctgtctctatttaaaatatattaggccaggtgcggtggctcatgcctgtaatcccatcactttgggaggccaaggcaggtggatcacgagtcaggagttcgaagccagcctggtcaatatggtgaaaccccatctctactaaaaatacaaacattagccagatgtgtagcggtgcctgtagtcccagctactcgggaggctgaggcaggagaatcgcttgaacctgggaggcagaggatgcagtgagccaagatcacaccactgcattccagcctgggcgacagagtgagaccccatctcaaaaaaaaaaaaaattttgctgggtctgtagtcccagctactcgggaggctgaagcaggaggatcacttgagcccagaggtccgagtctatagcaggctaggatgacaccactgcactccagcctgggtgacagagtcagaccctgtctcaaagaaaaaaaaaagacaggcatcaaacctaccgtgtgaaaacagggcaggtcttgattatcttgtattgcggccctgcacctcctgcagcaggtcatgggtctgtgatattagagccggatggccatcattgctgcagcctcctgtgggctattataatactaagtaaggccttgggctcctgtgacaggccctgctgatattacatggttgcaatactcaggttaaattataggccagc[139 bp omitted]aaccccgtctttactaaaaatacaaaatttagctgggcgtggtggtgggcgcctgtagtcccagctactcgggaggctgaggcaggagaatcgcttgaacccgggaggcgaaggttgcagtgagccgagattgcaccactgtgctccagcctggtgacagagcgagactctgtctaaaaaaaaaaaaaaaaaaaaaaaagttatttatataggaggcacctgagctcattgaactagtcccaaggtgtgtgagtggagtctggaaattgaattggagtgtgttccaggagtagttaagcagacccactgccgagtgtcagcactaccctgagcccaacaggaattcctgggtctaacactgtagtaggtcctggctctattacgtattatagcaagacaggccaggcacagtggctcagactgcaatcccagcactttgggaggccaagatgggaggctctcttgagcccagcagtttgagaccagcctaggcaacataggaagaccccatctctacaaaaaaaacttaaaaattagccaggtgtggtggtacgtacctgtagtaccagcgactcgggaggctgaggtgggaggatcgcttcagcctgggaggtcgaggctgcagtgagctattatcatgccactgcattccagcctgggtgacagagtgagaccctgtctcaagaaaaaaagtaaaaataaaagaccgatggatgtttcagaggtcagtatagatttagctagaacattctagcagaacaccaacgatgttctagatgagtttgaggaacacatcaagccttcccagggacattcattctacaaatgtttattgcgctgttccccagggatggctgcaagagtgagcaagacagctccagccagagcctggtgtcagagcctgcaatccagtgggatccctgggggcccagcctggctgcggagtgggggcgttaacaggaaccgggggctactatggacgccctgtgtgccacgtggagcctttggcc[144 bp omitted]tactaaaaaaaaaaaattagccaggagtgatggcaggtgcctgtagtcccagctactcaggaggctgaagcaggagaatggcgttaacccgggaggcggagcttgcagtgagccgagatcgcaccactgcactccagcctgggtgacagacagagactccgtctcaaaaaaaaaaaaaaaaaagaaataggttggtgcaaaagcaattgtggttttttgtttgttgtttgtttgtttttgagtctcactctgttgcccaggctggagtgcagtggcacaatctcatctcactgcaacctctgcctcccaggttcaagcgattctcctgcctcaccctcccaagtagctgagattacaggtgcccactaccatgtctggctaatttttgtatttgtaatag[138 bp omitted]agtcttgctctgtcacccagactgaagtgcagtggcacaatctcggctcattgtaacttccgcctcccaggttcaagcgattctcctgcctcagcctcccaagtagctgggactattcagcgagtgccaccatgcctggctaatttttgtatttttagtagagacagggtttcaccatgttggccaggctggtctggaactcctgacctcgtgatccgtctgcctcggccttccaaagtgctgggattataggcgtgagccaccgtgcccggcctgcaattggggttttaatggcagaaaccgcaattacttttgcaccaccctaatataaagacacaattattatccccattttccagataaagaacctttggctgggagaggtgtacctggaagagtcgtgttttggttttgaactcaggtgtgattgccccccaggtcagtagggggcactattgtgtaagggtggagaggaggggcagcggttaggtggttcagggtgcacagctcaaagctgcctggggccattctaggcacagaggcaggggccagggccggctttaaggccagctcctcgtgcagtctgaggagtggatcagaagggaccagcacctggtgagtgctctacttgaaccatcttgaaactggaaccaaggggaccacatttttgttttatgctgagtgtgtcctgccatgggcttttcctttcccttccccttctccttcccctcccccttccccttcccctctcctcttctcttctcttccgttttttggagacggagtcttgctctgtcgcccaggctggagttcaatagcgcaatctcggcttactgcaacctccgcctcctgggttcgagtgattctcctgcctcagcctcccgagtagctgggattacaggtgcgcactaccacgtccggctaatttttgtatttctagtagagacggggtttcacca[138 bp omitted]ttttttttttttttgagacagggtcacactctgtcgcccaggctggagcacagtggcgcgatctcggctcactgaaacctctgcctcccaggttcaagcgattctcctgcctcagcctcctgagtatctaggattacaggcacaggccaccaggcccagcgaatttttgcaccatagagatggtgtttcgtcatgttggccaggctggtctcgaactcctgacctcagatgatctgctcgccttggcctcccaaagtgctgggattacaggcatgagccaccgcgcccggccttgccaggggctttctactgcactatagtgtggacttcaggacattgtagctgtcctgggggagcccaggtgacagtctaagggggttctaatagagccctggggacatgacagcaggatcccagggggagagagggtgtagtcagggctcattagaacagagccctgaggatctgatgcaagtcaaccagctgatgctataaatgggctccagagacattgcaggaacccagggcatctgcaagggtttcccaggtggcactaagggaccttgaggcctttttctttttctttttctttttctttagggtctcgctcagtcatccaggttggagtgctgtgatgcaatcatggctcactgcaacgttgactgagacctttttcttccgtgacaggaaggagggctatgatggggaatgtctaggcagacccctgggaggcctcctggttaaagccccaggccattacaacagcaaggagaggagatcagaatggggcaaggaaagacactccagatgaccacggccagctgaatcatggcctcagagacgtccatgccctaatcccccaaaacctctggctgtggccttatatgggaaaagggactttgtgatgtgattaggttaggttcagatggggagacgatctcggattatccaagtagccctaaacataatcacaggactcctttggagagggaggcaggcgggttggtgtcggagagagaagacgtgaggaccgacatatgggtcagagaggggagaggatgccgtgctgctggccttgaagatggaggactgggccatgagccaaggaatgctggtagcttctagaagctgggaaaggcaaaaacaccgattcttccctggagcctcc[141 bp omitted]caaaaattagccgggtgtggtggcgggtgcctgtaatcccagctactcaggaggctgaggcaggagaatctcttgaacccgggaggcggaggttgcagtgagccgagttcgcaccagtgcactccaagctgggcaacagagccagactccatctaaaaaaaaaaaaaaaaaggaacacaaaacctgtgagtatcataggtggtccaaggagctttacgaatgtcctggtaatgttacagcagggccctgggggtggggacgtgagagctaaggctgggttatagaggaccccacagtgatggtagtcagacttccaggaaaagcatagcaggctcctgagggacactgtaacagggcattgaggattctgtcagggtccaaggaaccttaaaatggggcccaggggctgctggaatagtgtcctgaagacattacatgatcccaaggaaactagaggggacagctaaggacagggcagttgcctcagggtattttggggaagagctgagggtgctgtaattaggattcttaagaaattaaagcaggtggccaggc[138 bp omitted]tggcaggctcacgtagtcccagttactcgggaggctgaggcaggagaatggcgtgaacctgggaggcgcagcttgcagtgagccgagactgcaccactgccctccagcctgggcgacagagcaagactctgtctcaaaaaataaaaaaaagaaaagaaaagaagaaaagaagaagttaaagcaggttctttctgtctcttaggagtggaccttgggatgggtgtcactggatctcccttctagtaggacacagggagaatcaggtaggacacagtaggacacaggcagaatgagaaaaatgaagacattctggacaaggagaacagagatttacctggttaattttatgtgtcaatttggctgagccacagtgagtgaagagatattcggtcaacattattctggatgtctctatgagggtgttttaggatgagatttacatatatatttgtgagacagggtcttgctgctgcccaggctggagtgcagtggcgccatcacggctcactgcagcctccaactcttgggctcaaggggtcccccagcttcagcctcttgagtagctgggaccacaagtgcgcaccaccacacccggctaatattttaattttttgtagagataagctctctctgttactcaggctggtccttgaactcaagcgatcctcctgccttggcctaccaaagtgctgggattacaggcatgagccactgtgcccagctgagatttatgtttagattgttaggctttgagtaaaggaggttccccttcctgaattgagggaggctcatccaaccacttgaaaccctgaatagaagaaaagtctcggctgggtgcggtggctcacgcctataatcccagcactttggaaggctgaggcgggcagatcacgaggtcaagagatcgaggccatcctggccaacatggtgaaatccccgtctctactaaaaatacaaaaattaaccgggtgtggtggcaggtgcctgtaatcccagctacttgggaggctgaggcaggagaatcgcttgaacccgggaggcggaggttgcagtgagccaagatcgggccattgcgctccagcctgatggcagagcgagactgcgtctcaaaaaaaaaaaaaagaagaaaagtctgcccagagggagagggagtcctgctaggcaattgtgtctcccacctgctggctcccccattagactttggggtttctttctttctttctttcttttttttgagatggagtcttgctctgtcgcccaggctggagggcagtggcgggatctcagctcactgcaagctccgcctcccgggttcacgccattctcttgcctcagcctcctgagtaactgggactacaggcgcctgccaccatgcctcgctaatttttttatatttttagtagggatggggtttcaccatgacctcgtgatctgcccgccttggcctcccaaagtgctgggattacaggcttgagccaccgcgtccaacatttttgaaattttttttaaaaatagagacagggtctccctatgttggccaggttggtctcaaactcctggactcaagcgatcctcccaacttggcctcccaaagtgctgggatgacaggcatgcaccaccacacctggcccccgcatcagactctgaaccagctgaacgtccactaatcctggaagccaattcctcaaatgaatctctttctgtgtatgcatatacacattctgtggattctgtttctctagagaacctgaactacctgaccagcagttccactcccagatgtatgctcaatagagctgaaaacaggccaggcatgggtgtcttgcacctgtcatcccagtgctttgggaggccaaggtgggaggctgtcttgagcccagcagtttgagaccagcctgggaaacatagcaagacactatctctgcaaaaatacaaaaattagctgggcctggtggcaagtgtgtgtaattccagctccttgagaggctaaggcaggtggagtgcttgagcttgggaggttgaggctgcagtgagccatgatcgctccacggcattctagcttgagtgacagagccagaccctgtcaaaaaaaaggaaaggaaggaaggaaggaaggaaggaaggaaggaaggaaggaaggaaggaaggaggcaaggaaggaaggaggcaaggaaggaaggaaggaaggaggcaaggaaggaaggaaggaaagacttcatattatatgattcaatttctttgaaatgtgcagaataggcaaatctatcaagacagaaagcagatgaatggttgccaggggtctgggagcagcggctgtttaacggggacagaccttctgtttggggtgataaaaaagctctggaactcggatagaggtgacagttgcacagcactgtaaatgtgttaaatgacagtaagggtaaatattttgaatattttaccacaatgaaataagtgtatgggaagctttgtagcaggagtgtgggcgggggctggtgcctggaggggccttcgagtgaggcagcattgtatggggaccatgtggtcactgaagtcctagcagaaggatgtggtttttttttttttttgagacggagtctcgctctgttgccagtctggagtgcagtggtgcaatctcggctcactgcgacctccacctcccgggttcaagcaattctcctgtctcagcctcccgagtagctgggaccacaggcccaccaccacgctcagctaatttttgtattattagtagagacgggggtgtcacc[133 bp omitted]tttaaggggatgccgggggaagggcttgaaggaggaactaaggaggcttccagaagattttgattaacagcgagcgctagggaaggccacggggatacagaggggtaggaggaggatccagagacctccaagttgtggactccggaggcatcgagttcctttcccagttttgtcaagaattccctgagcggcagacaccctcaaagtaaaaaacgggaaccacagagaaggaaaaagaagaaccacaagcgttttgagaaacaaacaggctgggcctagggcctggggtgtgccctgcaactggggggtggggctggatgttcttggagtcagggagcagcagcctcccacaggatgtgagagaggaactggggtctccagtcacgggagccaggagccggccagggccgcaggcaggaagggagcgaggctgaagggaacgtgagccgaccagggcccgactgagggaggaggggctgggggcctggaaccctgggtctgagggaggagtggctgggggtctcgacactgggtctgagggaggaggggtgggggcctggattcctgggtctgagagaggagggactgggggtctggacgctgggtctgagggaggagggaggaggggccgggggggcctggactcctgggtccgagggaggaggggttgggggcccggactcctgggtccgagggtagagcggttgggggcccggactcctgggtccgagggtagagcggttgggggcccggactcctgggtccgagggaagagcggttgggggcctggactccggggtctgagggaggaggggctggggcctgaggggggcggaaggggcgtggcggagctcggggccgggactctcagcctatcaagtgtctgtaattaattaaccaactgagatccagttcaggggtgaaagttcttcaggtacgaggagggcattgttgtcagtctggaccgagcccgcagagcccctcctcggcgtcctggtcccggccgtgcccgcggtgtcccgggaggaaggggcgggccgggggtcgggaggagtcacgtgccccctcccgccccaggtcgtcctctcagcatgggggtcccgcggcctcagccctgggcgctggggctcctgctctttctccttcctgggagcctgggcgcaggtgagggccgctccgggccagggccctgctgcaggcgggcggcgggaggcggccccaggcaggcaggggcgaagccagcgggacccgagttccccgcgagcccctggcgctgccttctccgctcaattaactttctcaacgtctcctgctgggcctgaggctgggaaccacctgtcgcctcttgtgtctgtttccctctctctctctgggtctctgtccccctctctttctgggtctcttgtctctctctctctgggtctctgtccccccccccccgggtttctgtcccctctctctgaatctgtccccctccctccataatagattcttctccctccctgggtatctgtcccactgcagtctagttccccgcccgtgtgctcccttcagctctgtttctgtctgcagaaagccacctctccctcctgtaccaccttaccgcggtgtcctcgcctgccccggggactcctgccttctgggtgtccggctggctgggcccgcagcagtacctgagctacaatagcctgcggggcgaggcggagccctgtggagcttgggtctgggaaaaccaggtgtcctggtattgggagaaagagaccacagatctgaggatcaaggagaagctctttctggaagctttcaaagctttggggggaaaaggtgagattccggtctggaggggcaaggggccgggtccatgctccggggccccgcttacctgtgtttgggcgccccaggtccctacactctgcagggcctgctgggctgtgaactgggccctgacaacacctcggtgcccaccgccaagttcgccctgaacggcgaggagttcatgaatttcgacctcaagcagggcacctggggtggggactggcccgaggccctggctatcagtcagcggtggcagcagcaggacaaggcggccaacaaggagctcaccttcctgctattctcctgcccgcaccgcctgcgggagcacctggagaggggccgcggaaacctggagtggaagggtgagccggatctgcagccgcaggctgttctgtcctctctcccgtcatgcccacctgcctcagttcccctgccaggaccctccatcagcctcccactgcagcccacgctctgcccccccattcctcaggggtccttctacactcagccctcccatggctccccagcgccccccaggacaaactcctggcttccttccttgccttctttttttttttttttttgtgagacggagtttcgctcttgttgcccaggctggagtgtaatggcgcgatctcggctcaccacaacctccgcctcccgggttcaagtgatctcctgcctcagcctcccgagtggctgggattacaggcatgcaccaccatgcccggctaattttgtatttttagtagagacggggtttcttcatgttggtcaggctggtctcaaacccctgacctcaggtgatccgcccacctcagcctcccaaagtgctgggattacaggcatgagctactgctcctggctccccccttttttttttttttgagacagattctcgctctgtcaccccaggctggaatgtggtggcaccatctcggctcactgcagcctgaacctcccaggctcaagcagtcctcccacctcagccaaccaagtagctgggaccacagcccagcatcatcacacctggctaactttatattttgtagacacggtgtctcactatgttgcccaggctggtcttgaactcctaggctccagcgattctcctgctttggtctcctgagtagctgagattacaggtgcataccaccataactggctaatttttttttttccgcacaatctctgttgcccaggctagtgtgaagcagggtgatctcagctcgctgcaacctccgcctcctgggtttaagggattccgctgcttcagcctcatgagtagctggcactataggcacatccaccatgtctggctaatttttatacttttagtagagatggggtttcgtcatggtagctaggctggtctcaaactcttgacctcaagtgatccacccacctccgcctcccaaagtgctgggattacaggagtgagctaccgcgtctggccatacctggctaatttttaaaatttgttgtagaggtggcatctcactatgctgcccaggccagactcaaactcctggcctcaagtgattctctcactttggcctcccagggtgctgggatgacaggtgtgagccactgtgcttggccttccttgccttaatgtcctcatcagacccacgcagcagcacttgtctctacgcagccatcagagtctacgctccagccacccaacataagcaatctcctccctctgggcatttgctcatccagtttcccctggcacctctctgttccacccttccccctctctgcatatactccagccctccttattcttcaaggtcagggctggatatcacttcctctgagaagcctttcctcagctctgtagggcagagttcactgtttcctccccggaggcccccagatccccactcattcaactgttggccaagagcatttgcactgccaggcgctgctctgggccttgagcaaagagggaagtgacacacattcaccctctgtggctcccaggctgctggacaaagatagataccagctggggatgtgcacagatattcattccaagtgccacaaaggagaagttgagactcaaccaggtagtttttctttaattgtcttctttctttcctaagtagggaaaatttctttctttttttgagacagagtttcgctcttgtcgcccaggctggagtgcaatggcgcgatctcggctcactgcaacctccgcctcccaggttcaagtgattctcctgcctcagcctcccgagtagctgggactacaggcgtgcaccaccacgcctggctaatttttgtttgtttttttttttttagtaaagacagggttttaccatgttggccgggatggtctcgatcttttgacctcgtgatctgcctgcctcggcctcccaaagtgctggaattacagacgtgagccactgctcctggcctttgttgttgttgttgttgtttttgagacagactcttgcactgtcgcccagactgcagtactgtggcgcaatcttggctcactgcaacctccgcctcccaggttcaagcaattctcctacctcagcctcccgagtagctgggattacaggcacacaccaccatgcctggctaatttttgtatttttagtagagacgggggcttcaccatgctggccaggctggtctcgaactcctgatctcgtgatctgcctaccttggcctcccaaagtgctgggattacaggcatgagccaccactcctggcttaaggagggaaagtttcaaaccacacttaagtagaaacaatagtataaaacggaccagacacggtggctcacgcctataatcccagaactttgggaggccgaggcaggtggattgcttgatcccaggagttcaagaccagcctgggcaacatagtaagaccgcatctctactaaaaactcaaaaaattagcctggcatggtggtatgtgcctctagtcccagccactggggaggctatggcaggaggatcgcttgagctcaggagtttgaggctgtagtgaactgattgcaactctgcactccagcccagatgacagagccagaccctgtctcaaaaagaaaaaaaatatggtggccaggtgcagtggctcacgcctgtaattccaacactttgggaggccgaggtgggcagatcacttaaggtcaggagtttgagataagcctggccaacagagtgaaaccccatctctactaaacatacaaaaattagccgggtgcggtggtgggtgcttgtaattccagctattcgggaggctgaggcaggagaatcacttgatcccgggaagcagaggttgcagtgagccgagatcaagccactgcactccagcctgggcaacaaagcaagactctgtctcaaagaaagaaggaaagaaagagagaggagagggagagagaaagaggaaggaaaggaaggaaggaaggaaggaagcgagcatcccatcactgagacttaataattatcaacccatggttttttgaatttcacgcacatcctcactcacttccccaccccacttcacatcaagctttggtaaatctcagacatcacagtgtttttttctttgtttgtttgtattttgagatggagtctcactctgtcatgcgggagtgtagtggctcagtctcggctcactgcaagcttcgcctcccaggttcaaacaattctcctgcctcagcctcctgagtagctgggattacaggtgcccgccacctcgcccagccaatttttgtatttttagtagagatgaggtttcaccatattggccaggctggtcttgaactcctgacctcgtgatccacccaccttggcctcccaaagtgctgggattacaggcataagccaccgcgcctggccaatttttgtatttttagtagagacgggatttcactatgttggccaggctggtctcgaaccctccacctcaagtgatctgccctcctcagcctcccaaagtgcgggagtcaccgtgcccagccagactgttttgttgataagtcctttagtatgtaactctactaggtaagggcatttaaaaaaaattaataccaaaaccatcatcacacctacaaccaattaactctttaatggcatcagatgtccagtttttgttcccatattcctgactgtaaatgttttttaaagtttgaatcagcatccagcaaggtccacacattttgttgtcttttcagtgtctttttctgattgttgaatttttctttctttctttttttttttttttttcctttttgagacagggtcttgctctgtcaccagactggagtccagtggtgcaatcatagctcactgcagtctgaacttcctgggctcaagtaattctcccacttcagcctccccagtaggtaggaccacaggtgcacgccatcaggcctagctatttttgtttgtttgttttttgagacaaagtcttactctgtcgcccagactggagtgcagaggcacgaactcggctcactgcaacttctgcctcccgggttcaagcaattctcctgcctcagcgtcccaagtagctgggattacaggcgcaagccaccacgccctgctaattttttgtatctttagtagagacagagtttca[144 bp omitted]ctgtcacccaggctggggtgcagtggcgcgatctcagctcattgcaacctccacctcccaagttgcaccaattctcctgcctcagcctcccgagtggctgggactacaggcgcccaccaccacgcccggctaattttttgtatttttagtagagacagagtttcactgtgttaggcaggatggtctcgatctcctgacctcctgatccgcctgcctcagcctcccaaagtactgggattacaggcttgagccaccgcgcccggccggattccaattttttaccagataggtgttttgcaaatatttcttccactctctaggttgtcttttcattgttttaactgtgcctttcacaaagcaaaagtttttaactttgatgaaatccagtttattcttttttttttttctatcgtggattatgcttttggtgtttaatctcagaagtaatcaccaaacccaaagtcagctagatcttctcctgtgtattttaagagttttaaagttttgcattttacagttaggtctgtgattcattttcaggtaatttgagttacttgtgatcttgagtgtcttttgatttacaggtttcccattttctttttgttttttttccccctgtaattgtggtttgaagaaagtcagtttatgtcctattgagtttctcctagactggattttgccctttgcatcctgtgatgttgctggaaatagtcctccttctcttctttaaaggagcagctccatctagaagcttggtcagattctggttcaatttttatggcaagaaaactttctgggtagttggtgcgtatgtctgtgtgcataggctgcaaacatctgcttgcttctgtgctgttctgtggaccactggattcgggtgttgttatgaagttctttgtcaggttttctcctgatggttttagcggatagcaatggccattgccttaatcttttttttttttttttttttttgagatggagtcttgctctgtcgcccaggctggagtgcagtgttgcgatcttggctcactgcaacctccgcctcccaggttcaagcgattctgctgcctcagcctcctgagtagctgggattacaggtgcgtgccaccatgcctggctaatttttgtattttttttggagagatggggtt[145 bp omitted]aggctggagtgcagtagcacgatctcggctcactgcaacctccacctcccaggttcaagtgatcctcctgcctcagcctccttagtagctggaattacaggcacacaccaccacacccagctaatttttgtatttttagtacagacagggtttcaccatgttggccaggatggattttttttttttttttgagatggagtttcactcttattgcgcaggctggagtacaatggcatgatctcagctcactgcaacctccgcctcctggattcaagtgatcctcctgcctcagcctccagggtagctgggactacaggcatgcgctgccatgcctagctaatttttatatgtttagtagagatggagtttcaccatgttggcgaagctggtcttgaactcctgacatcaggtgatctgcctgcctcagcctcccaaagtgctggggttacagacgtgagccaccatgcctgacctggtttggtattttgttaaacagaaccaaaggccagacagattttctgtgcttggatttagtctatattggaagtaccttgaggctgaaggcacgtggctgtgagcacgacacaggaagatacagatttgctgaaaagaatagtgaacataaagcagaagccagaactgctgatggccgtcagcccggtccctccattccacctgacggtgcagcaaattctgccgacttgccagagaggcagctccaggagggagaagctgctgtgctttcctgaagcagcaaatgtgttttctgctgagcaaccaaaaccaagatcccagccaagacccacgattgcccagatccaccctccctgaaaggaacttgggcagtaatgcccagtcctaggcagttgctgaaatctttgccttttattttcttttttgagctgggatcttgctctgtcgcccagactggagtggagtgcagtggcacagtcatagcgccatgtagccttggactcccaagctcaagagatcctcccgcctcagccttacaagtagctgggactataggtacacgtcaccatgcctggctaacattttctattttttgtagagatggggta[132 bp omitted]tggtgaaaccctgtttctactaaaaatagaaaaattagctgggcgtggtggtgtgcgcctgtaatcccagctactctggaggctgaggcaggagaatcgcttgaccccaggaggcggaggttgcagtgacccaagattgtgccactgtactccagcctgggcgacagagactccgtctcaaaaaaaaaaaaaaaaaaaggaaaagaaagcctgggcgtaaggatccttctgccttgacctcccaagtgctggaattgcaggcatgagccattgcacccggcttttttttttttttttctttgagacaggcacttgcactgttgcctagactggagtgcagtagcgggattagagttcactgcagcctcaacctcccaagctcaagcgatcctcccaccttacccttcctgaatggatggggccacaggtgtgtaccatcacacgtagttaatttttaaactttttcagagacggggtttctccatgttgcccaggctggtcttgaactcccggcttccagtgatcctcctgcctcagcttcccaaagtgctgggattacaggcatgaaccactgcacccaaccttttttcattcccttaacgaaacctttggatgaacaaaaattcttaatttcagtgaagttcagtttatcgacttcaatttatacattttataaagtttatgaatttttttttttttttttagacggagtcttgctctgtcgcccaggctggagtgcagtggctatacccaggtgtgatcataactcactccagcctcaaactcctgggctcaaggattcctcctgcctcagtctccagagtaggtgggaccacaggcacatccaccacactggctaattttttttatttgtagtggagactacgtcttactgtttgcccaggctggtctccaactcctgggttcaagtgatccacctcattctcccaaagcgctgggattgtaggagtgagccactgcacccagcctgtctgctaatattatgtttaagagttctgaatctttttttaaattttttaaaatttttaattttttattttttttgagacagtcttgctctgtcgcccaggctggagtgcaatggtgcaatcttggctcaatgcaacctccgccttctgggttcaagcgattctcctgccttagcctcctgagtagctgggattacaggtacacgccaccatgcctggctaatttttttgtatttttagtagagatgggatttcaccatgttggtcaggctggtctcgacctcctgacctcgtgatcctcctgcctccaccccccaaagcgccaggattctaggtgtgagccaccacacctgtcctgaatctatatttatgagagacattggccttaagctctctttttttttttttttttttttttttgagatggagtctcgctctgtcacccaggctggagtgcagtggcgcaatctcggctcactgcaagctccgcctcccgggttcacgccattctcctgcctcagcctcccaagtggctgggactacaggcgccggccaccacgcccggctaattttttgtatttttagtagagatggggtt[145 bp omitted]tgacctcataaaatatgctgggagagtgtttcctctgttttatggcctgaagagttagtgtaggaatagaatcatttctacattggaagaattcactaattgatgtcttctggacctggaattttagtttttggaaagttttaaactatggattaaaaattttaaataggccgggtgtggtgcatcatgcctgtaatcccagcactttgggaggctgaggcaggtagatcacaatgtcaggaatttgagaccagcctggccaatatggtgaaacaccgtctctactaaaaataaaaaaattacccggcatggtggtgcatgcacctgtagtcccagccactcgggaggctgtggaagaagaaactcttgaacccaggaagtgggggttgcagtgagtcgagatcgtgccactgcactccagcctgggtgacagagcgagactcttatctcaaaaacaaaaggctaggcgtggtggctcacacctgtaatcccaacactttgggaggcc[134 bp omitted]gaggcaggagaatggcgtgaacccaggaggcggagcttgcagtgagccgagatcgcgccactgcactccagcctgggagacagagcaagattccatctcaaaaaaaaaaaaaaaatttaaatagttataggactacagacgttttaaatttcctcttgtgtcagtttagaaggttgtatttatcaggaatgtgttcagttcatctaaattttcaaatgtgttgctgtggaatttttcataattatcctctatctttttttttttttctttttttctgagacggggtctcactctgtcgcccaggctggagtgcagtggcacgatcctggctcactgcaacatctgcctcccaggttcaagcaattctcctgcctcagcctcctgagtagctgggactacaggtgcccggctaatttttgtatttttagtagagatggggtttcaccatgttggccagtgtggtctcgaactcctgacctcaggtgatccacccactttggcctcccaaagtgttgcgattacaggcgtgagccaacatgcccagcccaaggaggtgacatcttgaggggacaccttcggggtggacaggttgagtctctgtcacctaggaagtgcctccccttttaccactgtattatctgcggttagcacagtgcaaacatggaggcctctttctgtccctatccagccctggctctgggagtggtgggctcgcgacttaggcctgtctgcctgatttcctgcagagcccccctccatgcgcctgaaggcccgacccagcagccctggcttttccgtgcttacctgcagcgccttctccttctaccctccggagctgcaacttcggttcctgcggaatgggctggccgctggcaccggccagggtgacttcggccccaacagtgacggatccttccacgcctcgtcgtcactaacagtcaaaagtggcgatgagcaccactactgctgcattgtgcagcacgcggggctggcgcagcccctcagggtggagctgggtgaggtcccgccaggtggtgatgctcctggtttcccgttgccttgtctcactgctgcgccggtccttcctgagtctgaccttcctccccactgctgccacctccttgaatctgactgccttgaacctcacgcctgtcagtgcccccaaaacctgatggcttgtccttcccaaggccaactgccttccgtctcctgctgcttctggcctcactgagtctgaagagctgttaactaccatggccagtcctccctgagtctgaccatcttccatcctgctgctgctgctgctgctgctgcgggtcttcctggaatctgaccattcgttgtctgctatgcccgtcctcaccaagactgactgcctgctgctttgctactgcccgggcccatgagactgacttcccactgctctgcctgcctctccccactgcactggcacagccccgccttgccgctgctgatccattgccggtgtgaccgcggccgctcgtgctgtagctggttcttacgtccaacctgggggcagtctgcccagatcgcctgcctggcctcgcctctgcccatcagacacttggtgctggaatctccgaggctgggagggactgggagcgccccagttctgtgtcctgactgggtggggtggaggggctgctccacatctcacagcgttctctggctgcagaatctccagccaagtcctccgtgctcgtggtgggaatcgtcatcggtgtcttgctactcacggcagcggctgtaggaggagctctgttgtggagaaggatgaggagtgggctgccaggtggggggcagcgggaggaagagcctctgagagagggacagagaccccaagagaggggcacacagacctgggaggacagagacccagagaggggggacagagatcagagagaggtggagacagaaacccagagatgggagaacagaggtgcagagagagggggacggagacagagacccagagacgggggaacagagacccagaggggacagagagaggtgcggacagagggagggggagacagacccagaggagggaggcaaagatgtagaaagaggggggacggaaaattgggagaaggggagacaaaggcccagaaggaaggggatagagactgaggaagagtgtgtgagacacacacacaaatgggggacgccagtcagacccagagcgcctcagagattctgatgacctctccctctctctctctcctcagccccttggatctcccttcgtggagacgacaccggggtcctcctgcccaccccaggggaggcccaggatgctgatttgaaggatgtaaatgtgattccagccaccgcctgaccatccgccattccgactgctaaaagcgaatgtagtcaggcccctttcatgctgtgagacctcctggaacactggcatctctgagcctccagaaggggttctgggcctagttgtcctccctctggagccccgtcctgtggtctgcctcagtttcccctcctaatacatatggctgttttccacctcgataatataacacgagtttgggcccgaatcagtgtgttctcatcatttttcaggcaggggaggtaagggaataagtcgggggactgaatggcggctgggcctcggatctctcctacaggtaacatgctgccacaggggaacctgccagttttatacatcaggtcatgtattttctttttctttttcttttttctttttttttagacggagtcttgctctgttgctcagtccggagtcctgtggcgcgatctcggctcactgtaagctccgcctccctgggttcacgccattctcctgcctcaggctcccgagtagctgggactacaggcgcctgccac[131 bp omitted]caccgcgcccggcctaaggtcactttttttttttttttttaagacagagttttgctcttgttgctcagactggagtacaattgcgtgatctcagctcactgcaacctccgcctcccaggttcaagcaattctcctgcctcccaagtagctgggattacaggcatgcaccaccacacccggctaattttttgtatttagtagagacggggtttcaccatgttggtcaggctggtctggaactcctgacctcaggtgatccacctgcctcagcttcccaaagttctgggattacaggcattgagctactgtgctcaacctgaggtcatgtatttttaattcataacttttacaaatatttactggatgactgccatgccaggcattttgaggaattcttggctactgtctgaccacctgaatccttggagccgaagaggagcgaggagcagtgttcactcttggaggaaatgggatatttcctccggccccttgattctgctctcccttttcttttcttttcttttctttctttttttttttgagacggagtttcgctcttgttgcccaggctggaatgcaatggtgcgatctcggctcaccacaacctccgcctcccaggttcaagcaattctcctgcctcagcctcccaaagtagctgggattaaagacatgcgccaccacacccggctaattttgtatgtttagtagagatggggtttctccgtgttgatcaggctggtctcgaactcccgacctcaggcgatccgcccgcctcggcctcccaaagttctgggattacaggcgtgagccaccgcgcccggccttttttcttttctttcgttctttttgtttatttttgttttgttttgttttgtttggtatagaagtgttggaacgtacacctctttcttaaaccatcctgacaaagggaaagggaaaaatacatttcccgtgaggcgttgtgactagaacagctggaggtggacggcagagtgccgcgacgactgccaggagttgtagttctccccggccgcgtcactgcggtgtcgcccacccttcttccccgggcaggccgcggtttcctttgtggacgtggcgaggagtgcccgcggcaccccgtgcactcattggccccgccccgtgagacgctcgtgcgagctcattgggcggggggcggggctctgcgctgccagaggcggggcctgactggagagcggccgaattgggcacatttgcgggaacgcagagcggagcgtggagagcggagcgaagctggataacagggtaaagggagtgggtggggggcctctgtccagggagggcggctcgggtcgaggaccagggtccggactgggagcaatgacggggagcctgcctgacctctcgctggccacaactatgccctgcaccttgcgtgggatgtgcgccacgtctgtctctgtaattccccctggcaggtctgggacccccctgagactccgtcagaagattcggtcctccccataggtggctttacctctaagcatcccgccctcttttcccccatcgcccgccctttttgagcccgaaagcttgcagccaacttccaactccctgtcctgtcctaggtaacccctccaccccgccattctcctatcccgtgtctgtccccatccctgtgacccctgacccctggcctttgccactccccagggaccgatgatgtggcgaccatcagttctgctgcttctgttgctactgaggcacggggcccaggggaagccatccccagacgcaggccctcatggccaggggagggtgcaccaggcggcccccctgagcgacgctccccatgatgacgcccacgggaacttccagtacgaccatgaggctttcctgggacgggaagtggccaaggaattcgaccaactcaccccagaggaaagccaggcccgtctggggtaagagagacattcggttggggcgtgtccagaggtggggcttaggagagagacgcgggggtatcgacaggggtcagagaaatggcgtggactgaacttcatttctttgtgagaaatgaaattctaccttctatccttgggaaaaagaaattaagttaaaattgaggcctaaagaggacctttgagaccgggcgtggtggctcatgcctgtaatcccagcactttgggaggccaaggcaggccgatcacttgaggtcaggagttcgagaacagcctggccaacatggtgaaatcccgtctctactaaaaatacaaaattaggcaggcgtggtggtgggcacctgtaatcccagctactcgggaggctgaggcaggagaatcgcttgaacctgggaggtggaggttgcagtgagccaaaattgcaccactgccctccagtcagggcgacaaagtgagactccgtctaaaaaacaacaacaacaataaaaaagaggacctttgagggcagcaaaatctgggttagattctgccccctaagcgctccttattcttttgtcccagacatctcccctccccaagcctcagtttcctgctctgtaaatggcagggactggtgtggaaaatgaggtttggcctttaaggagcccggccagtgcaggagagtggcagagccctgagtttcagggtgagctgggtggaatggagccctgtccaccctctccgtccaggcctgagcgcaggggggcgcgatgggagcagccgccttcttctgtgcatcctcctgacactgattgagcctgcaaaggtttatcgagcacctgctatgtgccaggcactgctctaggtgctgaagtcacaacagctaacacatctgtcctcctgaagtttacactgtggtgagggaaacagcaagaagtcaataagtagaaagtggatcaaatagagataaatgcatccaagaaagataaagcaagagagtcagaaagtgtggaggggagaggttgttggtgggggggagttgcaatttttatttatttatttatttatttatttacttattgagatggagtctcgctctgtcacccaggctggagtgcagtggtgcgatctcggctcactgcaacctccacctcctgggctcaagcaattgtcctgtctcagcctcccaagtagctgggattacaggcgctagccaccacgcccagctaattttgtatttttattttttatttttatttttgttgttgttgtttttgagatggagtctcgctctgtcacccaggctggagtgcagtgacgtgatctcggctcagtggaacctccgcctcccgggttcaaccagttgttctgcctcgtactccctagtagctagagtcctagctacaagtgaacgctacaagtcctagctacaagtgaacgcctccacatccagcaaagttttttttctttccttttttttttttggagacagagtgagactctgtctcccgggctagagtgcagtggcgtgatctcagctcatgcaacctctgcctcccaggttcaagcaattctcctgcctcagccttccgagtagctgggactatgggtgcacgcccacacgcccagctaatttttttttttttttttgtattttagtagagatggggtttcactgtgttgcccaggctggtctcgagctcctgagctcaggcaatccgcccgccttggcctcccaaagtgctggaattaatgcgtgagccacagcacccagcccaggcccaggtaatttttcttttttttcttttttttttttttttgagacggagttttgctcttgttgcccaggctggagtgcagtggcgcaatctcggctcaccacaacctccgcctcctgggttcaagtgattctcctgcctcagccttccgagtagctgggattacaggcatgcaccaccatgcccggctaattttgtatttttagtagagatggggtttctccatgttggtcaggctggtatcgacctcctgacctcaggtgatctgcccacctcggcctcccgaagtgctgggattataggcatgagccaccgcacccggctggagctgcaattttaaacagggaacttggacaaggcctccatgagaaggtggtatgtggtatttgagccatgtgggtatcggagtgaatagcattccaggcagacagaacagttaagtgcaaaggccctgaggcaggagtgggcttggagtgtcagagcaacagttctgaggcccgtgtggctggaactcagtgagaaaggggagagagtgggaggtgagggcagagaaggagcaaaggggttcagcatggtggttcatgtgtgtgatcccagcactttgggaggccaaggctgggggatcacttgagcccaggagttcaagaccagcctgggcaacatagtgataccccgcctctacaaaacaaatacaaaaattagcccagcatggtggcgtgctcctgtagtcccagatactagggaggctgaggagggaggatcacttgggcctgggaggtcaaggctgcagtgagccaaaatcatgccgctgcactccagcctaagcaacagagcaagactttgtctcaaaaagagagagggccaggtgcagtggctcacgcctgcaatcccagcactttgggagtccaaagcgggcggattgcctgagaccatgcaaagggggtcagatcatgcaatgcaaagccttttaggccacgatgaagatttaggcttttctccaattgagagtagaactgagggagggcatgagctgacttaggttttgagagaatcctgctggctgcgaggtggggaacagactgtagggagcaagaagcagggagcccagtgaggaagcgactgcgatagtccaggtggaagacaagacaagatggtggtcagatcagggtggagacagtggcagtggtccccaggactgctggctgggagattgtgcttggatgggcatgcatgaaggagaaatggaggaagaagggcagtgacaggttagcacatttagcttagcactaatggcaatgccaggcattgtcctaagtgctttattattgttattattattattattttgagacgcagtctcgctctgtctcccagtctggagtgcagtggcgtgatctcggctcactgcaagctccacctcccgggttcatgccattctcctgcctc[132 bp omitted]c[136 bp omitted]gctgcgcctcccaggttcacgccattctcctgcctc[135 bp omitted]gcctccaaagtgttttttgtttgtttgtttgtttttgagacaaggtcttactctgttgcccaggctggagtgcagtggcacgatctcggctcactgcaacctacgcctcctgggttcaagcaattctcctgcctcagcctcccgagtagtggatattacaggcatccaccactgtgcccggctactttttgtatttttagtagagacggtttcacc[141 bp omitted]gcccaggctggagtgcagtggtactatctcggctcactgcaacctccacctcccagattcaaccaattctcccgcgtcagcctccagagtagctgggatttcaggtgcgtgccaccatgccctgctaatttttgtatttttagtagagacaaggtttcaccatgtgg[136 bp omitted]aaccgcccttttggggtaggtaccgttttttcttcctccgttttacagaggggtaactgagacacagagaggttaagtcacttgcccacagtcacacagccagtaagaggaagtggctggatttggacctaaaatgtctggctgtggagcccaagcgcttaacaacaccaggaacctcagagaagggtgtgattccggggacagagtggggccctagacagactggagcagagaccgcctggtgcgggaggtggggcggtgactcaggcaggcctggagagggctctgctgtctcggattttcgactttagggagggggccgcgggggcctagggacggtgacagggaggagggctccaggtagtctctgttaattagagattgggagaggaccggcctggcaaggcgtcaccaagggagaggagaggggcccgagagctgataggcgtggcccaagagaaggggagagatggaacctaaagtggcttgacatgcgacagggaggggcacaggagcccggaggagcatggggaggggcagagggagactgagcccccggggttgcgggtgatggtcctcaggcagtgcctgattcagccgggagcaggcaggggaaagccacggggctcagcacagggcagggctggagggagaggagcctgaaattgacacgcgcagcctggtaagggggaggggcatggggcgggtcggggcctgagacagcgggggatcgggggtgtggccgtggctgtctgggttcagagtcaatcttgcaacagggcccccttggcaagggtcacagtgcgacgccgcgctccccttcaccaccccagctcggcccagcgagaggtgcagcacgtgcaggccgagggcggggccggcgcggagagggtggccctgcatcgtagtaggtccctcccccgcagtgctcccagcaggcccgctcgttctggagaagggcgtgactcgacctgggggtggaccctaggctgaggggtagggtcctccggtgggcttggtcccgaaattgacccgcgcccctccccagttagcccgcggaccgtggactgtattttcagccccggatccgaagtgtcccagggggcgtggcccgtgcgaggggcggggcctgggggcgggaccagagcctgacgtgtgcccgccccggcttctaggcggatcgtggaccgcatggaccgcgcgggggacggcgacggctgggtgtcgctggccgagcttcgcgcgtggatcgcgcacacgcagcagcggcacatacgggactcggtgagcgcggcctgggacacgtacgacacggaccgcgacgggcgtgtgggttgggaggagctgcgcaacgccacctatggccactacgcgcccggtacgcggcgagcccccgaccctgctccccatacaccgtgaccctgaccttctggaccgcctcattctgagaaccctgaacccatttacccggagtccctggcccctaaccaggctctacccacttttaggagcccataactgtgagatcttcagtttctcacctctggcttctcttttttgtttttcgtctgcttatttttctggtatttagctgcatgctaaaaacgatctttttttcaaacatgaagtcacaattaggtgctaaaagccactgaacgcacccaaacagggacttgaaacctgggccctcaaattaaaagtccaatgctctaccaactaagctacccaggttcccttcagggctttcattctgggactcaccacctctgtgacaatatgactagggtacttgagatccctggccaaggacacctactttccatgccttgtcatcctgacccctaacttctgtgacctctcatcctgagaaccccaaagccagttactcagcccctgactctcagatccctcctttctgtcccaagtcccagcctcagtgccccacaccctgccacacacacagccctcattctctccctcctctcctctctgtccctggccccagcctccccgtccagtctgtcctccacagggctccgggggcggggttcttcatgcccagcactgactctgcccctccctccccctcctgggcccccaggagacggtcccactccccagccgggacgtttcctcctgtggctttgtttttctgcattttctgcaccaaatggattttctgtggttttcctgaactcaccacactcttcaaacctctaccttctgcccatattgttccctccagttacaatgcccgtcccctcctctcagtcaagccatctcagtccctgtaagctaccccatcacagccttagtctggggccaaaaggcccactgtcaactcatagtgggccattcctgtctccacacgcttggatcagttatttcttctctctgagaatcaatttttgcattcagaaagtagaatacatggaaaaacccactgtatgtgcttttttgtgatgattaaatgcaatattgtgcataaagagcttagcatataatctctcacaa[140 bp omitted]caaaaccccgtcttaccacaaaaaaatacttagctgggcgtgatggtgtgcacctgtgatcacagctactctggagggtgaggcaagagaatcacttgaacccaggaggcagaagttgcagtgagccgagatcacatcactgcactctggccttggcgacagagtgagactctgtctcaaaaaaaaaaaaatatatatatatatagatagatagatagatagatagatatagatatacacacacatactaataatatgttatataacatattatatacttaaatatatatacaaattatatataaagtatcaatatatgcttttttttttttgtgagggagttttgctcttgttgcccaggctggagtgcagtggcgtggtctcggctcactgcaacctccgcctcccgggttcaagcgattttcctgcctcagcctcccaagtagctgggattacaggcatgcgccaccacgcctggctaattttgtatttttagtagagatggggtttctccatgttggtcaggctggtctcgaactcccaacctcaggtgatctgcccacctcggcctcccaaagtgctgtgattacaggtttgagccaccgcacccggcctacttttttttttttttttttttttttgagatggaatggagtttcactcttgttggccaggctgcagtgcaatggcaaggtctcggcttactacaacctcatcctcctgggttcaagcaattctcctgcctcagcctcacgagtagctaggactacaggcgcccaccaccatgccaggcaaatttttgtatttttagtagagaaggagtttca[131 bp omitted]acatagcctccctctgtcgcccaggctggaaagcagtggtgcagtctcagctcacggcaacctccgcttcctgggttcaatcgactcttgtgcctcagactcccgagtagctgggattacaggcgtgccccaccatgcccggctaagtatttttttggtagagatggggtttcgccatgttggccaggctggtctcaaactcctgacctcaagtgatctgccagcttcagcctcccaaagtgctgctattacaggcgtgagccactgcatccagcctactgatatatacttattaactccacagaaatctttgtaccccagtaggatttactttgtctttgttttaacctgcttggcgtttcctccattaaagctcatctcactgagacctgtccttccccaggtgaagaatttcatgacgtggaggatgcagagacctacaaaaagatgctggctcgggacgagcggcgtttccgggtggccgaccaggatggggactcgatggccactcgagaggagctgacagccttcctgcaccccgaggagttccctcacatgcgggacatcgtgattgctgtgagtggcggctggggaaccctgtcccccacacccttccggggacccaggcttccggttcaggtcctgcttcccagcaccgacctgggggcaggcagtcacctggttctccagcatcttgccggggaagccaggccgcaaacacaggtcagaggacggtgacctttcccacctccactctcagtcccctggggtctgatctctcctcgtctggccttcccctccctgtgctcgcatttggggtccaggcccccagccttccctcagacagccactgtgccccaccttatacaatttcttttctttcttttttttttttgagacatagtctccctcggttgcccaggctggaaagcagtggtgcgatctcagctcactgcaacctccgcctcccgggttcaagcaattctcctgcctcagcgtcccgagtagctgggattacaggggcgcaccaccacacctggctaatttttagtagagacagggtttcttcatgttggttaggctggtctcaaacttttgacctcaggtgatccgcccgcctcagcctcccaaagtgctaggattataggcatgagccaccgtgcccggccaatttttaatttttttttctagtagagatgggatttcaccatgttggccaggctggtcttgaactccggacctcaggtgatctgcccaccttggcctcccaaagtgctgggattacaggcatgagccaccgtgcctggccccaaaatgtgctttgttctatagaagaaggctttttttttctttccttcctcttttttttttttagtttttgagacagggcctaactctgttacccagaccggagggcagtggctcaatctcagctcactgcaacctcaaactcttgggctcaagtaatcctcccacctccgccttctgagaagctgaggccaccaggcacaagccaccatgtctggctaatgtttttttttttttttttttc[132 bp omitted]cgccatgc[142 bp omitted]gccatgcctggctaatttttaaattttgtgtagagacagggt[135 bp omitted]taaattggggaacaaaagtcgttttgctccagaagggcacaaaaacaaggagcggaggtgtccagtgtgtcagaagaagccccaaagtgcaccatgttcacacataaagcagaggtaggttctaggctctgctaaacataaaggagcttctccccttggagggtgtttgctggggcttgagcaagttattagggacccaggacagctccccttgtgagcaacaaacctgtgcactgctggacattagggcctctgggctctggccccgtaaatgcaggtggtgcctgtttgatgataacatcccagaaagcccgcaaatttcccacatgccacctgttgagactgctctactgcctgcctcccacagctgcccggagctaaatttccaagagaacctctcactcttaccccaggggtccagcctcccccaggagccagggtcatcggcccccagcctcaatgcccctttctcctccaggaaaccctggaggacctggacagaaacaaagatggctatgtccaggtggaggagtacatcggtgagtgggccccaatttcttcttgggatgcctgtcctctctcaggcatgggcagggttggtgggggtagccggaggtacatcacccatcatcagagaacagtggccctcagacatgggggcaggggcactcactgcttgagttcatttagccacccaacatttattgagcacctactctataccagacacaaaaagcatctattgagcacctgctgtgtgtcacgcccaggatacacttactgagcacctactgcatatgggtggttgcgcctacagcagacaataacacagacaaatcccttcttgggggtctggagtttctacaaaatcaaggctcaggggctatgtttagttgagaatgggggtcaggaagctggtcttgaacctgcgcctgcacagcaaacactgtttcctgttacatgggatgttgggggatcctcacaataccccctgagttctgagttctccctgggcccctgccactgtc[131 bp omitted]gcaacctccgcctcccgggctcaagagattcttctgcctcagcctcctgagtagctgggattactggtgcctgccaccacgcctggctaatttttgtatttttagtggagatgggatttcaccatgttggccaggctggtctagaactcccaacctcaggtgatctgctcatcttggcctcccaaagtggtgggattacaggcgtgagcaaccacgcccggccaggaatttttttttaagtttgaaaacattgtttattcttttatttttttctgaccacatcctacatgagaaaacatttttctttctttccttctctcactttctttctttctgtcactctttctttctatctgtctgtctgtgtgtgtgtgtgtctctctctttattaaatagagatgggttctcactatattgtccaggctggtctagaactcctgggctcaagcaatcttcccaccttggcctcccaaagagctgagattacaggcatgaatcaccacacctggctgagagaacatttttatatttttttcttaagagatggggttgggccaggcgcagtggctcatacctgtaatcccagcactttgggaggctgagatggatggatcatgaagtcaggagttcgagaccagcctggccaagatggtgtactaaaaatacaaaaattagccgggcctgttggcaggagcctgtaatcccagttactctggggactgaggcaagagaatctctggaacccgggaggcaaaggttgcagtgagctgtaatcgcgccattgcacttcagtctgggcaacaagagcgaaactccatcttaaaaaaaaaaaaaaaagatggggtcttgccctgtcgcccaggctggagtgcagtggggtgatcttggctcactgcagccttgacctcctgggctcaagggatcctcccacctcagcctcccaagtagctgagactccaggcacagtgcggcctctggagatacttctggttgtcacttctagaggggtgaggatgctactgacgtctcctggatagagcccagagatgctccttagcattctccggtgcacaggacaggccc[131 bp omitted]tccgcctcccaggttcaagcaattctcttgtttc[213 bp omitted]ttcatcttccattcctcagctctaccaggcagacactgtcactatcctccattatatagatgacacctgaggcccaggggggttgaagggatctgctgaagacaatgggaagaggcagggctaggatttgaaccttggtgtttgggctctggcacctatttcttaactcctccccaaccagtaacatatcaaaatgtataaaattggggtgggtgccatggctcacgcctgtattcccagcactttaggaggccaaggtgggtggatcacttgaggtcaagagttcaagaccagcctggccaacatgatgaaaccctgtctctactaaaactagaaaaattagctgggcgtggtggcgggtacctgtaatcccagctacttgggaggctgaggcaggagaatcacttgaacccagaaggtgcaggttgcagtgagctgagattgtgtcactgcactccagcctgtaatcccagcactttgggagactgaggcaggtggatcatggggtcaggagtttgagagcagcctggccaagatggtgaaaccccgcctctactaaaaatataaaaattagctgggtgtggtggcacgcacctgtaatcccagctacttgggaggctgaggcaggagaatcgcttgaacctgggaggcagaggttgcagtgagctgagattgcgccattgcactacagcctgggcaacaagagcgaaactccatcttaaaaaaaaaaagggggtggggtcttgccctgttgcccaggctggagtgcagtggggtaatcacagcgagactccatctcaaaaaaaaaaaaaaaaatttgtagaaacagggtcttgctatgttgcccaggttggtcttgaatcttggcctcaaatgaccctcctgcctgggtctcccaaagtgttggattacagtcatcactgcacctggcatctctgtcacctgctaactggccagaaacatcctcgcacgttcctcctgcatagacattgcttactatgtgccaggcactgccttgcccattgcacacactacttcacgtgtgtgtcaatgaaatcaatcaatcatgcaatcaaccaatcaaatgaatttcacctgtaacacaaatgattgcttataagtcaggttttgttactaattccatcgaaacagaagaggacgctgaggcgagagagagggtagtgagttgctcaagggcctggttcaggaagtatcagagccaggatcagcccccagctccactagacccccagagctgcccctgaccttgtcccctctgtcccggcccccagcggatctgtactcagccgagcctggggaggaggagccggcgtgggtgcagacggagaggcagcagttccgggacttccgggatctgaacaaggatgggcacctggatgggagtgaggtgggccactgggtgctgccccctgcccaggaccagcccctggtggaagccaaccacctgctgcacgagagcgacacggacaaggtgcagtgacggggcctcggcaggagcgaggagcgggtgggcattgcgggccagactccagaaaggagcaagacctgggcctggagctcagggtcccttttaggtgggataaaaaaagagggacagagagagggaggaaaagagagggcacggagccccagaaagagagggggacagagacccagagacccaaagagagaaggacagggaccaagacggggacagattcagagagaaagggacagaggcccagagaacaagggtcccagagacttcgggacacgcttggatgcagggagggcttttgaaagcagggccgtgttgtcccctctgaaccctgaccctccctccaggatgggcggctgagcaaagcggaaatcctgggtaattggaacatgtttgtgggcagtcaggccaccaactatggcgaggacctgacccggcaccacgatgagctgtgagcaccgcgcacctgccacagcctcagaggcccgcacaatgaccggaggaggggccgctgtggtctggccccctccctgtccaggccccgcaggaggcagatgcagtcccaggcatcctcctgcccctgggctctcagggaccccctgggtcggcttctgtccctgtcacacccccaaccccagggaggggctgtcatagtcccagaggataagcaatacctatttctgactgagtctcccagcccagacccagggacccttggccccaagctcagctctaagaaccgccccaacccctccagctccaaatctgagcctccaccacatagactgaaactcccctggccccagccctctcctgcctggcctggcctgggacacctcctctctgccaggaggcaataaaagccagcgccgggaccttgtgtgtctgtctgttgtctgcctgtctctatgaagggtaagggggccctggagatggtttgggggctgtgactgggagttgggggctgagacatgcaataggggaccaggcatttgaaggaggggtgctgggtgttggagggattggagggcgttcctcagtataaaacaaacaaacaaaaaaaattgggccaggcccggtggctcacgcctgtaagcccagcaatttgggaggctgaggcgggtagatcacgaggtcgggggtcctagaccagcctggccaacatggtgaaaccccgtctctactagaaatacaaaaattaaccaggcctggtgatgggcacctataatcccagctactctggaggctgaagcagaatcgcttgaacccgggaggtggaggttgtcgtgagccgaaatggcgccactgcactccagcctgggtgacagagggagactctgtctcaaaaaaaaaagggaaaaaaagcctggactctgcagcgcacaaaccagacaggaagccctgccctctcagagctccagttctgtaaggaagagacacagcgacctaaaatatggcacggcgcaacagatgctgtgaagcaggggaagcgtgtagcagtgtggcaatgttctgatgactgagaggctgggaaaggtctcaatggtaaatggagtgaaggagggagccacggagagatctggagggagagcattccagggagagagaagagcaagtaaaatggccctgaggcaggagtgggcctggtgtggcagcatcagcaaggaggctagagtggctggaagggaatgagccagtggaagagggtcagagctgagagcagatggggcaagtggccagactgtgcaggcccctgcaggcaggtcatggtggtccctgtttggtggcacaagacagggatggacagagacccagagagaaggggtggggagtcagagagagagggacagagacccagagagagaggggaacagagacccagagagagagggacagagacccagagagagaggggaacagagacccagagagagaggggaacagagacccagagagagagaggggaacagagacccagagagagggagacagaaactcagagagagggaaacagagacccagagagtgggggacagagatccaaagagaatggggatagagacccagagagacacagaatttattctgagtgacatgagagtcgctggagtgtcatgagcagaggagggattataaactgctttgagttatttaagagtcgggttgggcgcagtggttcacgcctgtaatcccaaggattaatcaaggattgcttgaggccaggagttcaagaccagtctgggatgatct[139 bp omitted]gaccatatctctatttaaaaattagtttatggccgggcacggtggttcacgcctgtaatcccagctctttcagaggccgaggcaggcagatcacgaggtcagtagatcgagaccatcctggctaacacggtgaaaccccgcctctactaaaaaatacaaaaaattagccaggcatggtggcgggcgcctgtagtcccagctactcgggaggctgaggcaggagaatggcctgaacccggga[132 bp omitted]caagaacaggcaaaactaatctgggggttagaactcaggatgttgttcacccttgcgggggagggaccagaatggacctcatgggcttcttatcgggagagggaggctggaaaatagcctattcttgatctaggtactgcttcccaggggtggtcagattatgaaaattcattcagttctcca[131 bp omitted]gcaacctccacctcccaggttcaagcgattctcctgcctcagcctcctgagtagctgggattacaggcatgcaccaccacgcctggctaattttgtatttttagtagagacagggtttctccatgttggtcaggctggtatcgaactcctgacctcaggtgatccacctgcctcagcctcccaaagtgctgggattacaggcttgagccattgtgcctggccgatagctattttttttttttttttttttttttttttttgagatggagtcttgctcttgtcatcctggctggagtgcaatggcatgatcttgactcactgcaacctccacctcccgggctgaagtgattctcctgtctcagcctcccgagtagctgggattactggcatggaccaccacgcccggctaatttttgtatttttattagagacggggtttcaccatgttggccaggctggtctcgaactcccgacctcaggtgatccgccctccccgacctcccaaatttctgggatcacaggcatgagccaccgtgcctggccagttcggtttttttttttaggtttacctgggctttttggagtgtacccatgcagccaggtgtggttcagggtcagctagatatttgagtagagttgggccgtgtgcggtgactcacgcctgtaatcccaacactttgggaggccgaggcaggcggatcatgaggtcaggagatcgagagcatcctggctaacacggtgaaaccccgtctctactaaaaatatttaaaaaattagcctgggcgtggtgttgggggcctgtagtcccagctactcgggaggctgaggcaggagaatggcgtgaacccggtaggcggagtttgcaccactgccctccaacctgggcgacagagggagactccgtctcaaaaaaaaaaaaaaaaaaaaaaaaaaaaaagatacttgagtagagtttatagaaaccattccaggtaccctctctccagcttttcttttccaggatttatctcctcaccttccttttgctgtagttcttcaagctaggaagactggatttccctctggtgttttagctgccagtcatggtatgaactagaactcacccccaagtaaaagctgtacaaataagaaactcgcctttcttttttctgagtgtcaagttccctccagttgctctgtctgcttttgtttaccttccagtgccttgcctttgggtaattgttttccacgttttttccagggtttatagctgttgtctgtgtgggagggctggaatttgaatccaagcgcgtctgactccaagcgttttcgtatgataacatactgccctctagtggctggatgtggagaactggtttatgtgggaggaagggcatattggtaaatctctgagggctgcatgtttggaaacattgtttatcgaaaacaatacccacacatagcaacaaattacttgcacagaacagtttatggtgaaaaactgcctagcatcttgtcacacttactgcttctctccagaatttttttagttttaaaatattcttgcatattttattttaaaataatggccatactctcacaggatacaaaacccgaaatatacaggatgctacaagctaaaaacaacgccttccactaagttcaactcttcacagacagccagtgtttcctaccatggagaatctacacagatttaagcaaatatgtacaaatagtctttatttttttttggaagacgaatctcgatttgtctcccaggctggagtgcagtggtgcaatcttgtctcactgcaacctccgcctcccaggttcaagcgatactcctgcctcagcctcccgagtaactgggataacgggcacgggccaccat[142 bp omitted]caacctcccaagtagctgggactacaagcgcccgccac[138 bp omitted]gcccagccattttttgtattcttaatagagacggagtttcgccatgttggccaggctggtctcgaactcctgatctcaggtgatccggctgcctcggcctcccaagtgctgagattacaggcgtgaaccaccatgtcttgctaatttttgtatttttagcagagagggggtttcaccatgttggtcaggctggtcttgaactcctgacctcgagatctgccctcctcagccccccaaagtgctgggattacaggtgtcacccaccgcttccggccgcgttttttggtttgtttgttttgtgtgtgtgttttttgttttgttttgttttgttttttgagatggagtcttgctgtgtcgcccaggctggagagcagcggctcaatctcagctcactgcaacttccgcctcctgggttcaagagattctcctgcctcagtcttcctagtagttgagattactggtgccggccaccgtggctggctactttttgcgtttttagtagagacagggtttcaccatgttcgccaggctggtctcgaactcctgacctcaggtgatccacccacctcagcctcccaaagtgctgggattacaagtatgagccaccacgcctggccctggcctgcgttttttaagacataatcttgctctgccacctaggccagagtactgtggcactccagttgcagagagccaacattgtgccattgcactccactgatctcagctcactgatctcagccagctgcaagcgattctcgtgcttcagcctccctagtagctgggattacaggcgtgtaacaccacgcccagctaatttttgtatttttaatagagatggagtttcaccatgttgtccaggctggtctcaaactcctaagctcaagcaatcttcctaccccagtcccacaaagtgctgaaatcatgggcaggagccactgcgcccagccattctagctcgtgttttgctgagcatcgtcgcatgtctttggggtacacacacaggagtgaggtagtggagcaccggctaggcgcatttttagcgttaatcgatattgccaattcatttccccagtttacgtgcccaccagcgttgtagacaagttccagtttctccacatcctgaccaacgcttattagaataaacttttgaactgtttttgcttttagttcttccgttggtgacctccccacttgcagatcagcagatcaaatccccatgctgttgacaacacgctgggagcaaagagccaggtggagcttctaacgaagtcagatcttctgatattttaaaagctgagataaaattcacaggccataaaattaacccttggtcgggcgtggtggctacgcctgtaatcctagcacttcaggaggccaaggtgggcagatcacttgaggccaggagttcaagaccagcctggacaacatgacgaaactctatctctattaaaaatacaaaaattagccgggcgtggtggcacatgcctgtaatcccagctactcaggaggctgggacaagagaatcgattgaacccgggaggcggaggttgcagt[131 bp omitted]cccggacagccactaactactttcttttgctatggatttgcctattctgggcatctcattataaatgcaatcgtacgtgtgacctttcgtgctgggcttctttcagcatgttttccagatccatccacactgtagcccgtgtcaggacgtcattgcttttttttttttttttttttttgagatggagtctcactctgttgcccaggctggagtgcagtggcgcgatctcggctcactgcaagctccacttcccgggttcatgccattctcctgcctcagcctgccgagtagctgggactacaggtgcccaccatcacacccggctaattttttgtatttttagtagagatggggtttcaccgtgttagccaagatggtctcgatctcctgacctcatgatctgcccgtctcggcctcccgaagtgctgggattacaggcatgagccactgcgcccggcccaacgtcattcctttttagggctgagtaatattccatggcacgggctagaccacattttgtctccactcatcagctgacgggcttttgggttgtttccacttctgggctatggtgaatggtgctgttagggtcattcatgtgcatttgttttgcctcagcctcccaagtagctgggattaaaggtgtctgccaccacgcctggctaatttttgtatttttggtagagatagggtttcaccatgctggccaggctggtctcgaactcatgacctcgtgatccgcccacctcggcctcccagatcacgtacatatttttgtgtggacctgttttcagtttcttgggtagataactaggaggggaattgtgaagctgatttttccttttatacatgtctcactctgtcacccaggctggaatacagaggtgggatcacagctggacctcctgggctcacaccatcttctggcttcggtctcccatgcagctgggactacaggtgggcaccaccatgcccagctaatgtattcttttttgtagagatggggtcttgctacaatggccaggctggtcgccaactcctgggttcaagcaatcctcctgactcggcctcccaaagtgttgggattacaggcgtgaaccaccttgcttgggctgattttttttttttagatggagtctcgctctgtctccaggctgcaatgcagtggcacgatctcagctcactgcaacctccacctcccaggttcaagcgattctcctgcct[295 bp omitted]gagatcccttccctacttaaaaaatacaaaaattatccaggcacagtggctcacgcctgtaatctcagcactttgggaggccga[134 bp omitted]tgaggcaggagaattgcttgaacccaggaggcagaggttgcagtgagccgaaatcaggccactgcactccagcctgggcgacagggcgagactccgtctcaaaaacaaaaaaagagaaatggaaatctagtttttcacatgaaatctcccagctccttttttgcatttgaaaacttcatacagtaaaatccactccttttggtgaacagttctgaattctgataaaccagagtcatgtaaccaccacagtcaaaatccggaactgttccttcacacccccccagaatctctcttgctactccccactttggggtcaactccttcccctactctggcaacgaaagctttgttcctggttcgtatagttttgcctttgcagtgtcagaataaatcttcctgtttttattttctattgttttgatatggggtctcgctctgtagctcagactggagtgcagtggtgctatcgcagctcactgcagcctccacctcctgggttcaagcgattctcctgcctcagcctcctgagtagctgggattacaggggtgctccaccacacccagctaatttttgtatttttagtagagacagggattcaccatgtggaccaggctggtctccaactcctgacctgaggcaatccacctgctttggcctcccaaagtgctgggattacaggtgtgagctaccaggcccagccatcttcctgtttttaattttttttttgagatggagttttgctcatgctgcccaggctggagtgcagtggtgcgatctcggctcactgcaacctccatctcccgggttcaagcaattctcctgcttcagcctcccaagtagctgggattacaggcctgtgccaccacacccgattaagtttgtatttttttttagtagagatgaggtttcaccgtgttggccaggctggtcccaaatacctgacctcaagtgatccacccaccttggcctcccaaaatgctgggattacaagtgtgagccactgcgcctggcccgttttta[136 bp omitted]ctcctgagtagctgggactacggacgcatgccacgacgcccggctaattttttatattttcagtaaagacagggttttaccctgttagccaggatggtctcaatctcctgacctcatgatctgcccgcctcagcctcccaaagtgttgggattataggtgtgagccaccacgcctggcccgtttttaaatctttacaagtaactgtaattttctggacgcgctgcctgtgagcttcttgaaactggagccctcggcaggcacgcctgccatcagcgccaccaagcccaggtcttgctctaaactttagaccagtgtctaaggaaactctgctcaaaaaagacaagatttgtctcacttcccgtctctttcttctgctacggctgaagctgtggttctgctcttgcttcctctccaagtactttagaaccttaaatgacagaacagggtgaggtgactcaaatgtgtaatcccagcactttgggaatctga[151 bp omitted]cctgtctccactaaaaatacaaaaaagaattagccaggcatggtggtggtcgcctgtagtcccaactactcgggaggctgaggcaggagaatggcgtaaacccgggaggcagagcttgcagtgagccgagatagcgccactgcactccagcctgggcaaaagagcgagactccgtctcaaaaaaaaaaaaaaaaaaaaaaaaaaacccagcctggccaacatggcgaaactacatctctactaaaatactaaaaatacaaaacaaacaaacaaaaaccagctggctgtgctggcagcacctgtagtcccagctacccaggaggctgaggcaggagccaggatcacgcaagtgcactccagcctgggcaatagagcaaggctccatctcaaaacaaaaaaaaaaatgacagaacagattggagccaggactttgacctccccaccctgcactgcacaaagagtctgtgaacagagtggtgtttgagttcctttgggaaaacacaggtgcaagattagaaacccttcaggttattactgggggcaccggtgatctgttcaacatatgaacaagactggggttcttagatggctgagaaagctggaaggactcgggtggttgagaggtcttgagaaagaggacaaggattagggatgtggaaggaaagggtatgacatggaactctgggtatggagggatggggtgggagcttgtggaggtggagaggccagtgggtctctaggggagggaggacatgaaggatgggggaagtccaggacaaagtctgggggcgtctcagaggaaactggctcctgggggaacctggcttccgtcactccctcgagcacgtgtgactttgctcaagttgtgccttctcgatcatgccattgcactccagcctggggagtggaaaagtattactcactgaacaggatggtgcatgcactgtgattcactttggttgaaacctcatgtgtactcacataaagaacaggaaggacagaacctaggtggcattgctctgcgaggcaggaatgctgtgttttttgttgttggtgttgttattgttgttttttgagacagagtctcactttgtcgcccaggctggagtgcagtggcacgatctcagctcactgcaacctccgcctcccgggttcaagcaattctcccgcctcagcctcccgagtagctaggattacaggcgccggccaccacacccggctcatttttgt[265 bp omitted]gcccagcagctgcttttgtgactcaatggttattaaacacaaggccttaaggacagcccctacattcccagtcaagtctgacgccaccgggctggttcctggtccccgctctgccctggctccctcactctcccctgtacgccctctgctccttaaatctgcaaagtgcgttgctgcctctgggcctttgcactcgcggtttcctcttcctttccccctcaggctgccacaggtgggggcgtgatgctcctgaccgcctttcctagtccgggtgctgcgcactttttcacagaactgcacttcctttgtgggtctaatcacactgcagcccggaagacacgttcctgggcatttcctgttcttcaaacctggcaaaaatccgggaaccctaacaaagaactcgagaaatttctatgtagctcattaaagtggcgcactcacacggtcttggcttagacttggacttccggccactcaaccaattttaatgctgtgcatttgcgttctattcaggtttttttttttttttcttctttgagatggagtctcgctctgttgcccaggctgaagtgcaatggtgcgatcttggctcactgcaacctccgcctcctgggttcaagcgattctcctgcctcagcctctggagtagctgggaatacaagtgcgcaccaccatgcccggctaatttttgtatttttagtagagacaaggtttcaccatgttggcca[131 bp omitted]cccgctctttcaaactccagcgtgcgctgtaggagcactgtttgcacggccctgcatcctcgcctgccctgtccccggggcgcccacgccgcgaatgaaggcgccacgtcgttgcgcacccaagccggtttatttggtctcccgcacacactcaggcctgcatcaccggccgtgatttctccgcttgcagcttcactccggagcccgcgaagccggtaccgccctgggggaggtagagagaaggacgaggtagaggccggcccgggggtgaccagtggggctccaggtggtagtggggattcctaagcgggtcaaggtgaagcgggttgctggctaaggagtaggagttggggagggggcgaggcgaccgcagtgggtacggatggacagggcgcagggcgcagagaagagggtagagagtggcaggggaggagccttgggagggagcgtgtggagggggtggagccgtggagggctggaggcagggaaggggcggggccttgaaaaggaaggaggaggcggggcctaggagagcggagggggggaagggcggggccttgcaggagaaagcggggggggggggcggccttacagagcagagaagaaggcggggccttggagagttgggggaaggggaggggacgaagccttggagggggtgaaggggaggggcggggccttggagtgctgggggaaggggaggggtgggactcttacccgctgcagcacgatgatgtcgcggtctgtgagtttgtctccagtcacagggtccaccatgtccttccgaatcagcttctccacgcattcgagggtgaccacagccccactacggtgaggccgaaggcgggagactctgatcaggggccttcctggggacctactggccccaaagccggaccgccccgcaggttcccgagtggtcccttccctcccctcccaggtgactcacgagggccgcagcacagcgcagggggtggcgttgctcaggctgtcgcgggtcacggcacacacgtagcgctcgctgcgggtgatgagccccacgcggtccacggagctgtctagcggtgtgaagtgcacgggcgtcaggtccgacatgcgcaggggcttccctgacatggggcaggtcaccgtgcgggactgcaaggggcagagagaggcgggctcagtaggcagggctggcgcaggtggagagcgcgtggtccctgtgcgtgaggaggacggtggggaaccctggcgccctggcaccgtgcgtgccggggcgctgtgggggctcaccggcttctccagcttggtggccttggcttcgggcgtcagcgacgggatccagaagctgggcagcactttgtccttgtccttacttggaggacccacactgggcccaggttggacatcatctgtgggggaaggaagggactcagatgccgccccctgggcccgcccagcccgcggcgccccgccccccaacccacaagaagcccaacctgagtcacctgggctggtgcccgagagggccttggctgtgaaagggttgaggggccggctcacgatagccgactccttctccaggaagccccgcacatggtcctgcgaggccgcccgctgaagctccttctgctcctcgcgccgggtgccccgctgcttctcgtaggcctgcgtcggggaaagtgggctgagcatctgcccgtggggctgggggtatcttcctcccatttcacaggtaggtaaactgaggcccacaaaggggaccctctgatggaggcactatgtggcagagggtggtaactgccaccctgggtgggtgtgaaccttactgcgttgtatagccagactgccagggctcaaagcccatctctgtcactctgtggcctaagtgagcactatgacctctcctggcctcagtttcttcatctgtaaaacagcctaacagtggttacccacctcagcggctcactgaagggttacataaggtgagtgtttacagcatggagagcctcacctggcactcagctaagcatttaattaatgtcacctgctggccaattaagttttctatacagtgcatgccccagcccgtgtttgggacgggggatgtagacttcagatctaagggaatgctgaggagcccatgtctatggacggacagtgagtgaggacgggagaagtgaagccatgacctgagctcagccctgcctggcgcacagcagttgcctgggcggtgctgcagttccagaccaccctgggccacccagctgagtgaggaggtaacagtgacagtgatggatgctcatgagggcctccgacatgaccaccaggctgtgtggaggacatgggcacagggggagccacctgcttgggacaaaaagcccaataagcatgtgacctgtagtgtttcctgagcgccagcaaccaggcaggggaagagggggacagacccactgtgcctcaaacagggcccctcctacccatcaaatggctttgtccatggaaggccaggccgggttcccagtaacacgccttgagaatgctcatctgcgtgtacctcccaggtgccctgctgtgtcctctgatttggccgtcagcccgttttacagacgatgaaactgaggcccagaaaaaatgaggtgatgtcaattcacgtagcacatctttttttttttttttttttttgaaacagaatctcgctcggttacccaggctgaagtgcagcggtgccatctcagctcactgcgacctctacctcatgggttcaagcgattctcctgcctcagcttcctgagtagctgggattacaggcgcccgccatgcccggctcaatttttttttttatttttttatttttagtacagacagggtttcaccatgttggccaggctggcctctaactgttgacctcaagtgatccgcctgcctcggcctcccaaagtcctgggattacaggtgtgagccaccacccccgacccatttagcatatctttactaaggacctaagctacagggtgggaaaactcgaagtccataagggaaagtgggcatgtgtcagacagccacatgtacagctacaactatgctaagtgctaagagaagaggtgactggggcagatcctggggactggcaggagctcagaggaggcagcatctgggctgaaatcggtgagaaggatttggccggaagcaggggaggggaatggtgtaccaggcagagggaactgagatcagagggctctgagtggctctgcctgtgagctcagactcaaaagctcctgcctccgtgtgccgcctcctccccatccccatcaccttcatctgccgggcaatctccttcttctggtgcagaatgtactccaggatggcctcacgctcatacaggtagccatctgggctgcaaagacagggtgcaatgagaaagaaagaaagtgatcctcccgcctcggcctcccgaagtgctgggattataggcagaagtcatcatgatcagtcccaagttcaattatttgctagaattcacagaactcagcaaagctgttatactcatggtgatagtttactgcagtgaaaggatgcagattaaaatcagcaaaggaaaaaggcacatggggcagaatctagtagagactagatttgagcttccagctgtcctctcccaatagagctgcagggaaagtgcttcattctctcagcaacaatgtgtgccacatattgttgcagccacgagttcgagaccagcctgggcaacaaagtgagctcccctctctacaaaaaacaaacaaaaacgccaggtgtggtagtgcacacccgtggttccagctactcgtgggggctgaggcaggaggatcacctgagcctgggatatcagtgagccaagatgtccccattgcactccagcctgggcaacaaagtgaagactctgtctcaaaaaaaaaaaagaaacctgaaggtggccttgggggccctgatcattaattactgtcttctacaaaatataccactaattgagcacgtatttagtgcctggactcagcacctgttaagcctttgccctaccatcagaggtaggtcatgggaagtgtccaaaggtgagctgctccgatggcctcggcaatgctctgagagccctacaccccattagaagtatgttcctttccatatgttccacactatgaaacagatgctaggatcatgcccatgtcccatgtgagaatacagaggctctgaggataaactgctcatccagggttccctggctgtgcaggtggccagacccacgcacacagcctcctcctggcggttcccttgctctccccacccagacctacccatccctgttcccagctcacgtgacaacaggatcgtggcaaggctgcagggagagacaacagcagtcgaagtccttcacggcatcccggctcagtcgaatgttctgggtcccatagcccgaggccgctggggacagagatgggcagagtgatggaggggcggagcaacaggagacatgtccgtctccaaagccccagagagaggcacagagacaacgcggtggtgggggtgggggactcagagagaaacaggcagttgggagccgctgcctgtgtgctggggccacgggctgaacccacagggagttgtcaaccctggagggtgagaggcagacaggcctggtcactgagtggcagcttggtggaggggctgacggctgactcccctccacccttctgactgtgaccaagctcaagtgcctgtccctctttgggcctcagtttcttcctctggaacatggggtaacaagagcaccctccctgacactctgttgggaggagtgagttcatgcgcagaaggcagagaacacagtgccgggccacatggggtcatgggatcacccagctgttgtttacatggtcatggccatcagtgtatatcgggggcgggagagagacagggacagaggaagcaaaacctggggcacgaggggagagggtgactccaagacacagccatgtcccgcctcttcccaccccagccctgcacctgtgtccttcttcttctcgtggtaggtgtagacggcccctgcggtgcagttcttgccatgccgcgtcatcctagggaggaagggacagtggcaggactgtggttaccggaggcaggcagcacagggaagacctctgcagccctcagagctgatctgccccccttgatgggaaagcggaggcggagaaggggggtgaggtggaagagagggagggcatgtggtcgccaggcctcctccaggaagtcctccttccagactcacctagactcatttatatgtgaaaatagcacctttaacaacaaaactctttgtttggaggtaagagggtgagagaccagagttcaaattctagccactacttcagattagctagggtggtggctgtgccatttaatggaggggaaaaaaaaagacaccaagggggccactattgttgatgaatccactccaccttcccttcccctctcatatctgtaagctctgactgaggccaaggcgtggaccagcccagtgattggctcaaggctgggcacttagctaaggcttgacacttagctaaggcttgacccaatcgctgcctgccagtccactagcgactggatctagcagctgtgattatgtctcagatcgaccgatcagagggcaggtcagagtagggctctgtgtctaggggaagagctacctccactcccactgcaggtaaaggaggaagagaagaccccagaaccctggagctcaattcaaaaagcaaagctttttttattctgtaagttttcaaacacatacaaaaccagaatagtataaggaacccccatgatgtacccatgtcctgcggtccagcagctgtcaacattttgccaccttactttgatacctttgatcattccccatacttaagggcaacccccacccttttaaatgactttattgagacacaattcacataccataaaattaacccttttaaagtggtttcagaccaggtgtagtggctcacgcctgtaatctcagcactttgggaggctg[134 bp omitted]gaggcactgagaatcacttgagcccaggaggcaggggttgcagtgagccgacatcatgccactgcactccaacctagacagagcaaggctctgtcacaattaaaaaaaaaaaaaaaaagacattgcctaagccaagataatgcacatttattcctatgttttcttctaggggtttgatcattttaacttttactttttgagttaatttttgtgtatggtgtgaggaagggagccccctacttttctggagttcatttgtaaaaggagaagccctgaacccacagaggctgggcagctttcaccaagactgcttggccagtaaacagcctgcatgcctgtttgtttgtttgttttttgagacggagtttcactcttgttgcccagactggaatgcaatagcatgatcttggctcactgaaacctctgcctcccaagttaaagcgattctcctgcctc[220 bp omitted]gccaggctcagggctcacgcctgtaatcccaaaactttgggaggctgaagcaagaggactgttgagcccaggagatggagatgagcctaggcaacacagcaagatccatctctattaaatttaaaaacaaagaagttgatggccaggtgcagtggctgatgcctgtaatcccagcactttgggaagccgaggcgggggcggatcacgagatcaagagatcgagaccatcctggccaacatggtgaaaccctgtctctactaaaaatacaaaaattagctgggtgtgatggcacatgcctgtagtcccagctactcgggaggctgaaacaggagactcattgaacctgggaggtgcaggttgcagggagtggagattgcaccactacactccagcctggtgacagacagagactctgtcaaaagaaaaagaagagaagagagaagatctagtaacattatatacttgtctcactcatctctaagttgccacctaaaaattctcccaagcttaaacagttgcaaaggatacaatttccagcaacgtaaatgtgtagctgatggaatctaaatactgtaataatttgagaccatttgaaaaatgcaagaaaaagctgtttcaacagcagaaaattatacatgtcctgtttttctctttgaacttgtatttccgttccacttccctctctgccacccatttttaatctaacatcgttttttctttttgtttttttttttgagacagggactcactctgttgtccaggctggagtgcagtggtacaatcacagctcactgcagccttgacctcctgggctcaagtgattctcctgcctcagcctctcgagtagctgggactacaggcatgtgccaccacgcccagctaatttttatatttttagtagagatggggttttgccatgttgcccaggttggccttgaactcctggactcaagtgaactcctggcctcccaaagtgttgggattacaggtgtgagccactgcacctggcacatcatatcttttgtgcttgaaaattcttttttttttttttgagatcgagttttgctcttgttgcccaagctggagtgcaatggcacgatctcagctcactacaacctccgcctcttgggttcaagcaattctcctgcctcagcctcctaagtagctgggattacaggtgcatgccaccatacccagctaattttttgtatttttagtaga[143 bp omitted]ttatatgtctctgcaagaaataaaaaatatggataggaaatccttttaaacatttcccattgttcctaggctataagagtccaatactcttctagatcagtggttctcaaagtgtgggtcctaggaccctgtggtcccccaacacatttctagacagtctgcaaggtcaaaactgttgtcttaataatactaagacattatttgcctttctgattctcattctctcacaagtacaccagaggctccatgaggtgtgacactgcaacactaaattagtagtaatttgttacaacaatgataggaaactaatatagtcaccagggaaacgcacattaaaacttcactgaaggccgagcaccgtggcttacacctgtaatcccagcactttggaggctgaagcgggcagatcacttgaggtcaggagttcaagtccagcctggccaacatggcaaaaccccatctgtactaaaaatacaaaaagttagctggtcgtggtggtgtgcgcctgtaatcccagctactggggaggctgaggcatgagaatcgcttgaacctgggaggcggaggttgcagtgagccaagatcacgccacggcactctagcctaggggacagagcgagactccatctcaaaaaaaaaaaaaaaaaaaaaaacaaaataaaacttcattgagatacctccccacacgcaccacaagggttgcaattagacagaggggtgcaggcgaggacatggagctactagaaccctcgtgcactgctcaggggagtgcagaccagcacaaccactttggaaagcaactgtcagtatctactgaagccaggcatatgccagtcctatgagccagcaattcgtctcccacgtatacacctaacagaagggtacacctgtttacaagacacatacactgccctattcacaatggctcataaactggaaactaccccatgcctgtcagcacagagtagataaagaaactgggccatatcacataatggaaacacccagcaatgagacacaacagcctactgtcatacccatagtatagctgaatctcacagacaccacgcaggcgagacaccagacacgcaaaagaaaacttactgtatgatcccattcatgtgacgttcaaaaactcacaaagtaattactacaccagaagttatgtgtgggtgggtgtggtggctcacacctgtaatatgaacacttggggaggccaaggcaggaggattgtttgagcccaggagtttgagaccagcctgagcaacatagcaaaaccttgtcactacaaaacatagaaaaattagctgggcatggtggtgcatgcctgtagtcgcagctacttgggagtctgagatggatcacctgagcccagggaggtcaaggctgcagtgagccatgattgggccactgcactccagcctgggagtcagagtgagaccctgtctcaaaaaaaaaaaagtcaggtgcctttgggaggcagaaggtgggggtgactaggaggggcacaggtagcatctgggaggctgggaatgttgtttcttgatctgggtgctggttacatgggtgtgtttgctctgaaagtcgctgggttagacagttatgctttctgtacttctctgtacatgttataaaaagaaattggctgggtgccatggtgcacgcctgtaatctcagcacttcgggaggctgaagctggaagatcacttgagctcaggagtttgagactagtctgggcaacatattgagaccccatctctacaaaaaaatatatatatataaaaatttgctgggtgtggtggcacacgcctgtaatcccagctactcaggaggctgaagcaggaggactgcttgagcctgggaggtgaaggctgcagtgagccaagatggagccactgctctccagcctgggcaatagagtgagaacctgtctcaaaagaaaaaaaaaagaaagaaagaaagaaattaatggcgggggaacccccactccatcttggacatcattccccatcagcccaccaggcacgtccttggtctttatgtggctacagattcatccctgaatgaacacaactcttggatttgacacctgtggacagacatccttgtccactatgacaaagcagtttggtacccaatgtctagcacgtgtccaaggatgtttttcagataaattctttttttctttctttcttttcttcttcttttttttttttgagacagtctcgctctgtcgtccaggctggagtgcagtggcgcaatctcggctcagtgcaacctctgccacccgggttcacgccattctcctgcctcagcctcccgagtagctggcactacaggcgctcgccacc[184 bp omitted]aatacagtggtacaatcatagctcgctgcagcctcaaactcctgggctcaagtgatcctcccaccatagcttcccaagtagctgggaatacaggcatgcaccaccatgcccagctaattttttatccaggcagggtcttgctatgttgtccaggttggtcttgaactcctgggctcaagtggtcctcctgctttggcctcccaaagtgctaggatgaagggtatgagctactgcacccaaccctgcttttaagataaattttaaaagtggaataactgattcaaagggtgtgtgcatttaaaatgtggttagaggctgggctgagtgcagcaatgtttacaactaattgatcacaaccagctacagatttctttgttcctttccacttccactccttcacttgaccagcc[132 bp omitted]gcctcccaggttcaagcaaattctcctgcctcagcctcctgagtagctgggattacaggcgcgcaccaccatgcccagctaattgttgtatttttagtagagatggggtttcgccatgttggccaggctggtcttgaactcctgacctcaggtggtccacctgcctcggcctcccaaagtgctgggattataggcatgagccaccgtgcccagccaaaaaacttttttttttttttttttgagacggagtctcgctctgtctcccaggctggagtgcagtggcgcgatctcggctcactgcaagctccacctcccgggttcacgccattctcctgcctcagcctcccgagtagctgggactacaggcacccgcca[186 bp omitted]cagactgcacaggtctatatacctccaacaacatgagagagccactcctcacaactttgccccagggcttcctgggactggctctgagctgtgcctgggtcagcaaggaacctcctgcaccatgctgtggaaaatgtgccatcagtgagagactgggagaagatacttgtaatgcctacaatcaacaagggactaatatcattttcatttttattttatttattttgagacagaatcttgctctgtcgcccaggttggagtgtagtagcatgatctcggctcactgcaacctctctgcctcctgtgttcaagcgattctcctgcctcagcctccccagcagctgagatgataggtgtctgccaccaggcccggctaatttttttgcattttttttttagtagagacagggttcaccacgttggccaggctgatctcgaactcctgacctcaggtaatctggccaccttggcttctcaaagtgctgggattacaggcatgagccaccacacccaaccaacaagggactaatatgtagaatagtcagttctactataaggcatgcattcatagaaatcacagcaatatgcaaaatcctgcagtcaaaaaccacaaggcttacagagaaaacaggattgtgtcacaatcctcgtaaactttgtcggtgatgcttaaagaaaaagataagaacagaatacaaaaggagagaacagtttcacacgggctaggtggttaagacataccaacatactccaaaaatatggcagttgaccttgacaaagacttgaagtttgttgtggcaatgggtgtggggtggagggagcgccttgtgaattactgtgatgtggtggaaagagggttatttgagatctgatggaaagtcctagtaccagatgtggatgggtgtggctcctaacacccggggaactgcggtggtggtatttgtttgaagtgccgtgtatgtgtgctttgtgtattcccacacacacacttatagcagagtgcagtttcctggattcaccttggatgcacataagcaaatgtgaaattggtgttatgctcaaattgttccctgatatatcaactgcattggaataaattcacattttcaaaataagcattatagcagaactgatggtacatgaaactccagcaaatcaagaagaaaattacagccactccaatagaaagatgagtaaaagaggctgggtgccgtggctcatgcctgtaatcccaacactttgggaaaccaaggcaggaagattgcttaaggccaggagttcaagaccagcctgggcaatatagctagaccccatctctaaaaaaaaaaaaaaaatagtttgtttgtttgtttttttttttgagacagagtcttgctctgtcaccaggctggagtgcagtggcgcaatctcggctcactgcaacctccgcctcccaggttcaagcgattctcctgcctcagcctcctgagtagctgggactacaggcctgcaccaccacgcctggctaatttttgtatttttagcagagatgggctttcaccacgttggtcacgatggtctcgaactcctgacctcgtgatctgcccgccttggcctcccagagtgctgggattacaggtgtgagcccactgcgcccggcctgggaggatctttaaatcataatgcttagtgagaaaagagtaaaacaagagctcaataccatgtaggcacaggaaatctactgtgcatacaatgatactttttttttttttttttgagacgttatctcgctctttcacccaggctggagcgcagtggcacaatctcactgcaagctccacctcccaggttcacaccattctcctgcctcagcctcctgagtagctgggactacaggcacctgccaccacacccagctaattttttttattttttttttagtagagatggggtttcaccatgttagccaggatggtcttgatctcctgacctcgtgatctgcccgcctcggccttccaaagtgctgggattacaggtgtgagccaccgtgcctggcctacaatgatacattttaaagaacatttggccgggcacggtggctcacacctgtaatcccagcactttaggaggccgaggtgggcggatcacttgaggtcaggagttttgagaccagcctggccaacatggtgaaaccacgtctctactaaaaatacaaaaattagccgggcgaggtggcaggcgcctgtaatctcagctactcaggaggctgaggcaagagaattgcttgaacccgggaggtggaggttgcagtgagccaagatcgcgccatcgcactccagcctgggggacaagagtgagactttgtctcaaaaaacaaaaacaacaacaacaacaacaaaaaagaacacttgcaggtggggcgaggtggctcatgcctgaggtgagcagatcacctgaggtcaggagttcaagaccagcctggtcaacatggtaaaaccctgtctctaccaaaaatacaaaaatgagccagtcgtggtggccacctgtaatcccagctacttgggaggctgaggcacaagaatcgcttgaacccaggaggcggaggttgcagtgagccgagactgtgccaatgcactccagcctgggtgacagacactcatctcaaaaaataaagaaagaataaaatataaagaactcttgcagacaaaaggctccacatgacacatattagttgcattcaggaaagattgtctcctgctctcaagtagcctgcaagtaggatccagaagttggggtggggagcacaaccaagggtcccaccgatgtaaaaagcaacttcatctctatcgcccccttctggttgctttgaaaaacttgcctttcccattcaaaacttgaaacacaaacctctgggagctatggagctctctctccccctactggcgtcttctcagaagccactctttgggttttaggtatatttacacagaatcaaagcaaagacctttacagttggatgcgatctgacaaatgtatacacccttgtgaccacgaccctatggagatacagaaccttcctatcacgctaaataccccctcacgccccttcccgatcaatgtgccccctgaggcagccagggctgcttgcagaagggcgaccttgatcaaacaccccaacttgacccagggtcccctccacatgccaggctcctcctccgacttccccctgacccccaagcttctcagtgaacgtccaacacctgttgcctcccctcacctgccatccgctccccagcccccacaactgccactcatgaaggtcacggtgaccttttcatggacacattccccactctattcttagttgtcaactcccttgaccctctgcagtatttggctctgggcacctcggctttcccagagatgagcttgcttgctgttttgtggccaagaactgaggtttctacatagatggggacattttccctccaaaaataggaggaacacctatagagggagcatttaaactttttttaatttaatttgttttttttgagatggagtcttgctctgttgccgaagctggagtgcagtggtgtgatctcggctcactgcaacctccacctcctgggttcaagcaattctcctgcctcagactcccaagtagctgagataacaggcgcccacgcccagctaatttttttttttttttttttgtattttttagtagagacagggtttcaccatgttggccaggctagttctgaactcctgatctcaagtgatccgcccacctcagcctcccaaagtgcaaggattacgggcatgaaccactgcacccggcaaactctttgatttttaaaactcagtgatttttaagatcctgagaccagaaagcgtgagcgcctccaaccaagggtggaagaatagccagtttcaggatttacaaactctgaaagctgagctctcctgccccacactatattgtctctttggtaggtccaatttcaaactacaaagcagactgctgccatctgctgtcaccagcatttcagagaggaaacaggcaaagagcaggagcgaccgatgtcagcataatccctacctcacagcacaggaaacaggctcacagcatgtcccagctgggaaatggcagagctgggactcagacccaggcagccaggctctggagccattccttttaactaggtgacaactgtcagttttcctaggaaagtcacaatctcagaaaaaaggccaatcaggctggccacggtggcttaaacctgtaatgccagcactctgggaggctgagacgggtggatcacaaggtcaagatgttgagaccatccaggccaacatggtgaaaccccatctctactaaaaatacaaaaattagctgggtgtgttggtgcgcgcctgtggtcccagctgctcgggaggctgaggcagaagaatcgcttgaacccaggaggtggag[133 bp omitted]tctttcagcacatctcagtaatttcagtaattcagatgctaaattttcttttttttttcttttttttttgagatggagtttcgcttttatcacctagggtggagtgcagtggtgtgatctcggctcactgcaaccttcacctccccgattcaagtgattctcctgcctcagccttccaggtagctgggattacaggcacccgccaccatgcctggctaattttttgtatttttagtagagatggggtttcgccatgttgggcaggctggtctcgaactcctgacctcaggtgatccacccgcc[142 bp omitted]acctccagggctcaagccattctcctgcctcagcctcccaagtaactggaattccaggcgtgtgccaccatgcccagctcatttttgtatttttatatttgtatttttagcacagatggggtttcaccacattggcctggccatcagatgctaa[134 bp omitted]aatgtggcgaaaccctgtctctactaaaaatgcaaaaattggctgggtgtggtggcaggtgcctgtagtcccagctactcgggaggctgaggcaggagaatcgcttgaacctgggggcagaggttgcagtgagccaagatcgggccactgcactccagcctggccaacagatcaagactgtgtctcaaaaaaaaaaaaaaaaaaaaagcccggctctgaagcagaccctggctctaagcattttactgaatatcataacacctcaaacggtcgaatatcacaacactccactgaatatcacagcacctcaaatagttgctataaatgaagagaggcacagaggcggtgccctaggttatgcagctagtgagtcctacagctgtgtttgatccaagcacctgtggctttgaccatccactgtgccagctggctgcaggcggcctcaggcactgtgctgaactctgggagtggatcagacagctagtgtgtgtcttgtcctcccctgaaatcctgtctcctttctcctccagagcactgccaaggtttgcctcctccaagaagcctgcctctccgggatcagttaggttctccttgcacttgaccgtgccctgagctacctccgttacagcccgtccctcggtatttcggctccagagtaggggccctggttggtggggcctgggttgaacttcagcctgggtcccagcattgcctggcacctgggaggtctcagagatgtcatgatagaatcaatgaaccacctccaatcctagggccaggggaggtgggttagcaatgaactaaccatgcagccatgacatcatgccattaatacactaataattcattagtaacatgtgaatcacagaagcactggaagaacagaagtaatcatcacatccttcaaccccttaagaatcagaccttgtgggaagcactttccacatgtgaacacattcggtcctcatgacaacctccccacgttctgcccatttattttattttatgtatgtatgtatgtatgtatgtatttattttggagacagtctcactgtcaccaggactgaagtatttttttttttttttttttggagacggagtctcactctgtcacccggactggagtgcagtggcacgatcttgactcactgcaacctccacctcccaggttcaagtgattctcctgcctc[215 bp omitted]cttggagaaattggcctcttcctcagtctattccttgacaaaccagcctcaggggggcttttcagaatggaagtttgattaagtcactctcttcaactgcttcttggacatgactcaagacaaaaaccaaattattcagactaagtgtaagagaaatgggagaataggaaaactgccattttgcaacctctggtgaaatagctgactcaggcaatgattgttgatggatggcattaaaggagaggctgatggggcctggatagtcacaggatgctaattcttgctactggaaaatacacagttgtagctttacaatgcggttttcgatggctgccacctgtctcagtctgctccagctgccataacaaaacaccactctgggtggcttaaacaacagacctattttctccagttcctgaggctggaagtctaagttcaggctaccagcattgtggggttctggtgacaccctcttcctggtttgcagatggctatcttcagtggcagagagaaagctctctggtgtctccttctgttttttgggaggagtctcactttgtcacctaggttggagtgcagcggcggatctcgcctcccaggcccaagtgaatctcctgcttcagcctcctaagtagctgggattacaggcgtccaccaccatgcctggctaattttttttttttttttttgagacggagtttcgctctgtcacccaggctggagtgcagtggcgtgatctcggctcactgcaagctctgcctccagggttcatgccattctcctgcctcagcctcccgagtagctgggactacaggcgcccgccaccatgcccggctaatttttttgtatttttagtagagagggggttt[141 bp omitted]ttggccaggctggtcttgaactcctgatctcatgtgatccacctgccttggcctcccacagtgctgggattataggcatgagccaccatgcgcagcctcctcctattataaggacaccaatccatcagattagggccccactctttcaccttaattatctccacaaaggccctacctccaaatataatcaccttggggaattagggcttcaatatacgaatctgggggggacattcagtctataatgctgcctgagcctgaatgaatttcactacccctgaaaatggggcacccaggcagtatgcaacatgaagcgaccagctctgaagtaatcacctgacagctgaatggaaatttaatcaagtctttacattcaatttcctgattctaggaagtcagaggatatagcagggaataacaaaaaagggccagagagtaaatgttttgaactttgcaggccaaacagcccctgtaagtactccactcagcccctgtagcataaaagcagccacagacacacaaacgggcatggctgtgttccaataaaactttacttttagactctgacacggaatcacatataattgtcataggtcaccaaattcattc[137 bp omitted]ggtgaaaccccgtctctactaataatacaaaaacaaaattagccgggcgtggtggcgggcgcctgtagtcccagctactccggaagctgaggcaggagaatggcatgaacccgggaggtggagcttgcagtgagcggagatcacgccactgcactccagcctgagcgacagagcgagactccatcttataaaaaaaaaatgttaaaaaccatttttagtttgcaggctgaacaaaaacaggtagcagttacaaaagtcagatatctcctggctgttgtggctcatacctggatagggtgctttgggaggcaaaggcaggaggatcacttgaactcacgagttcaagaccagcctgagcaacatgccaaaaccctgtctctaccaaaaaaaagcagcagcagcatggtttttgagaccagacttgaacttgctatgggcaacatagcaagactccatctccacaaaacaaaatttaaaaaattagccgggcatagtggcatgcgcctgtggtcccagctacttgggaggctgaggcaggaggatcacttgatcccaggaggttgaggctgcagtgagttatgatcgtgccactgcaccactgcactccagactgagtgacagagtga[131 bp omitted]agaaaccccatctctactaaaaatacaaaattagctgggcgtggtggtgcatacctgtaatcccagctactcgggaggctgaaatgggacaatcacttgaacctgggaggcgaaggtcgt[135 bp omitted]actcaataatgaaaggacacctaacacaatttgaaaatgggtaaaggattggaatagacagttcttcaaagatctacaaatggccaataagcatgttaaaagacaccagttcacaccccctagaatgactataatcaaaaagataaataataagtgctggtgtggatatggagaaactggaacccttatacattggtggtagaaatgtaaaatggtacagccattctggaaaagtcacagtttctcaaaaggttaaatagtcaccttttgacccagcaattccactgccaatagaaataaaaacatacatccatgcaggcggggcgcggtggctcatgcctgtaatcccagcactttgggaggccaaagcgggcggatcatgaggtcaagaaatcgagaccatcctggccaacatggcgaaaccccatctctactaaaaatacaaaaattagctaggcgtggtagcgcatgcctgtagccccagctagtcgggaggctgaggcaggagagtcgctcaaacctgggagccgagatcacgccactgcactccagcctgggtgacagagcaagactctgtctcaaaaaaagaaaaaaaaagaaaagaagtatatcttgggtaaaggaatattatccagccataaaaagaataaagtagctggctgggcgccgatggctcacacctgtaatcccagtactttgggaggccaaggcaggaggatcacttgaacccaggaggttgaggctgcagtgagccatgatcgaaccactgcactccagcctgggtaacagagcaaggccgtgtctcgggaaaaaaaaaaaaaaaaagaagtattgatacatgccacaacataggtgaaccttgaaaacatgctaaatgaaagaaggaaggcagtcacaataatattttatggtttcatttgtgcaaaatacccagattaggcaaatccacagatatagcagagtagtggctgccaaagactggggtgggaaggattgggaggaaatagggaatgactgctaatgagtaccagggtttctttttgggtgatgaaaatattcttaaaatgatagtgttgatggttgcacaactctgtcaacgtactaaacaccactgaattgtatattttcaatgggtgaactatatgttaggtaaatcatatcccactaatgctttttttttttgagagggagttatgctcttttgcccaggctggagtgaagtggcatgatctcagctcactgcaacctctgtccctagggttcaagcaattctcctgcctcagcctcctgagtagctgggattataggtgccagccaccatgaccagccaatttttgtatttttagtagagatgaggttttaccatgttggccaggctggtttcgaactcctgacctcagatgatccacctgccttcacctcccaaagtgcaaggattacaggcatgagccactgtgcctgcccaatggggatttttaaaacaggtagctggcaggatttgagtttggtctgtagaacataattagctgatccctggcatgaggaaacaagtaaaatgaggccgggctcaatggctcacacctgtaatctaagcacagcactttgggaggccaaggcaggaggatcgcttaagcccaggagtttgagaccagcctgggcaacatagtgacaccttgtctctatctattttttcttttttttttttg[134 bp omitted]tcatgcccggctaaggggtttcaccgtgttagccaggatggtcttgatctcctgatctcatgatccgcccgccttggcctcccaaagtgctgggattacaggcatgagccactgtgtctggcctatttttaaatacttaaaaaaaaaaagaaagaaaacagaagcaggtaaaatgagaccacaaaaaagcaaacgggacaaattcagatggtgggatgatcaactgaactagaattagtttcttcaatgaatcgattacaccaagaaataaccaaagtggagtggaagggggaacagttctaaattaagagagatgtaaaagacgatagcaattacttaactatatcctgattccaacaaacccacagttacactggacttgactctgcaccacgtaatggatagtagtctagaattacggttgttcttttaaagtgtgatgatggtattgtggtcatatcagcaatgtttctggtttttacacacgcaccctgttagataaaatttatagaaggtcattggtttggattgagctcctgcactaggttcaacagaccaaaccaaaatggagacactcatgctaaagttccatgcttccaagccaaaactaagttgatatctgatcttctgagatatcaggagagagataatagccaaatccccaaacaacccagttttagcccacctgataaaggaagtcccctctactttaacctttaacttagaaatttaatcaagttaatcaatttaatcaactagctttttgttttccgtttctgattttctcagccctttgtctctgaaaacaacctctgctcagctcatcggaacactcacgctattttccataattagatgttgtttgattgtagattcacgaataaatgccaattaagatcttctcactaaatgtgttgcaattttgtcttttgacaatccttaagtgtcatgatgcctacgatttgttttaatctctttaagtttaaaaaaatacagcaagtatggcaaaaataatcattggtgatttgggtgacaggaattcctgtattcttctctcacttttatataagtttgaacattttcgtaagaaaacattaacatcaaactgcctcaaggaccgttcaagccccaagttcacagaattagcagcacaatcagaatgggaatccatgactgcctgaccccgaagctccacacaagaaaacgtgaatccctgcaccaaccccgaaagggaaggggctgtcaaaaaggtgaagagaaggtggcgatggatgactgcacaatctagtatcgcccgccgtcccaccacagtctgagaaactgaggccaggaaaggagttctccctcctcaactcccactccttagacccccagcaatcccagtccactccttcccttgggaccaccagcaaatagccatcatctacagcagaactgtaactctcaggagaactggccgatgctagctaccacttgactgagtttatagtgagagagagagacaaagagagagagaactgcccgatggacggttggccacctccagcagagtgtagttcagcttcaaacttggggcgcccggacagctgtattaataatgattgacagggaatcgggaatccaaaatcttgccccagtctccctcaagaccccaggcctctagcccgcaggaaagcgatcccagcaacactcttcctgcaccgcctcgaactcacctcactaacgactcccagtccctcggtcgcttcttcaactgtgccccgacaccggaaaggagcactattttccccctccgctccgcccacttccgcccagcagaaggcaccggaagtagagctgcccctagttgcggaagtgcctcgcctggcttgctcaagtcctctcttctctttctctctccggaaacgtgagtagctaatcgaaagttccggatattgaaactggtgggaatatggggaacgcttactatgtacgaggcatttcccagggagatcgttttttcctgcttggttcccaggttttgagtctctccaagcccaaatttaaggactaatcacttcccctagagatcgggaagcccactttcccaaatatatcatccacttttcttgctgcatcttaaaacaattgagaagagacaactacgctcccattttacagacagagccattgggaaattgaaaatcaaagccgttcaagtcgctctcaggaaacagggatttactgcggcactgcccagctgtcccagggactaaggcatatcgttcccgctagtttctagatacctagagacctagatattaatttttctagctcggacagacgaactcccaggggagagccagagcgggtaggggtcgggagggaggaggagggtcgaatctaatcccccaggtatcccatggtattcgacaccttggcttcctcatggagctctggcctttaagtcctttatcccaaggtccctttaaatactttgtcccttacctgagtcccgcccagggcaggtaatggcaagttccgcccacctgccagaaacggggatcaggcctggttaccgggagtggggcgcccctcctccttatcccctcccctcttccctgtcccctttcacagctggctgtagctggccaaggagttctcgattaaagaggaaggggcagtgctcacatttctgggcaggtaagtgaatgtccctggaggaagagcctggcttggggacccaggcatcctggctccccgcccctccgagacccagaagtttggggctcctaggcccaggagtccagggcccctgcccacttaggtccctagacccaataatataactaatcccctgcctctgcctctctcgtaatctttgttgtctgtgggtggatgtgacaatgagcacagaaagaggcacaagtggaaattaccaggaagggaagactccagatcaccagtggacatgtttataagcatctgtgtcaggtgctgtagacacagtggggaaagaaagataagctgcctgctccttgctttcttctctggcggacactgccttcactgaaatcctggctctcacacttgcacactgtgtgaccttcggcaagctatattacctctctgtgcctcagtttcctgttc[143 bp omitted]tctactaaaaatacaaaaaattagccaggcgtggtggtgcgcacctgtaatctcaactacccgggaggctgagtcaggagaatcgcttgaacccaggaggcagaggtcacagtgagctgagatagcgccactgcactccagcctgggtgacagagcgagactctgtctaaaaaaaaaaaaaaaaaaaaactcctgtgaaaagttttgttttgttttgtttttgacatggaatctcgctctgtcacccaggctggagtgcagtggcacagtctcggctcactgcaacctctgtctcccctttcaagtgattattctggctcagcctcccaagtagttgggattacaggcgcccacaaccacgcctggctaatttttgtatgactcctgtgaaaagtaaaatgagttgaggccgggcacagtggctcacgcctgtaatcccagcaccagcactttgggaggctgaggcaggcagatcacttgaggtcaggaattcaagaccagcctggccaacatggtgaaacc[132 bp omitted]ggcatggtggccggcacctgtagtcccagctactcgggaggctgaggcaggagaatggcatgaacctgggg[131 bp omitted]ggctgaggcacgagaatcgcttgaacccaggacacagaggttgcagtgagctgagactgtgccactgcactccagcctggctgacagagcgagactccatgtcaaaaaaaaaaaaaagtaaaatgagtttatataggtaaacagtatctggcacagaatacaggctgtgtaagtggctgctattattgccattcgtggaccacagaggccagtcagagaggcactgcctcattacccagggactaaggcccttgtcagctgtaacaaacctggttctaggtgtctggaaaatatgaggggccacccctctctgctgctgctatatatggcattaaccacctgcctggatacttcacccagtgaggagacagaccaaggtgagtgtttgggggaagtggcatccagacacttggcgttggcctccccctgactcaggaatgtttctagtccttcctcttccaggagtccaggacccagccccttcctccttcagacccaggaatctggattcccagcccctgctccttcctccaggaccccactgctttccatccccctatgactccagccctagggaccctccatttttctgtccctcatgtctttgggtccagaagtcttcctgggtcccccagaggcccagagcttcctgagtagccatacccggattccaagagccaaccactgggacctggagctgctcacaccagggaacctggaacgggagtgtctggaagagaggtgttcctgggaagaggccagggagtattttgaggacaacactctcacggtgagggcctcgagaccctggagtttcgggccctctctcttctctatacctgtggggaggttgcaggggtaggttctggccttcagctccctcctccttggtgtctcagaaatcaggatgggctagtttgggggtgtgaacctcccagctgaattcctgctttttccccttcttttccactccttccccctcaaggagcgcttttgggagagctacatctacaatggcaaaggaggtgagtgaggggctgaagccatcttgttctgtgcagctaaggtagtcccttcccagcgaggccaaaccaacgtcctccaccccaaattaggtacaagaatcgtctgccccccaattctgtgctctctgaagctggctgctaaaggagttccctcccttaagaccccagctt[135 bp omitted]ctcccgggttcacgccattctcctgcctc[224 bp omitted]aggctggagtgctgtggtacaatcttggctcactgcagcctcaacctcccgggctcaagcgatcttcccacctcagcctcctgagtaattgggactccaggcacacattaccatggtaatttttgtagtttttgtacagacggggtctcactatgtggcccaggctggtcttgaatgcctggcctcaagcaatccttctgcttcagtgtcccagactgctgagattataggtgccaggccccccaccacatcttattggacgcaagtcctgtgtccctaggaagggaaaagtgtcagtggagggaaaggttagagctgtggggcccgtcaggccttaggctcagaggggcaggcccacctgaacccttccctggtgtccagagtaagtggaaagaccagcccctccggcagcttgattgctggggacacagccctctagcaacacgaccaagggaggaagcctgcccatcctcacctgcccattttgcccccaagaaccccttctctgaggggttgccatcttgttcccatcttgttgccagccttgttgctaaggggggctgctccttagcaacggggcctggccaggccagaccagacgaagaagcctgaagcagtacctggctgatttcccctcccccacagccccatcccagcagctgcctggttgctaaggaggccttctccctagcaaccacacctagccaggctccaggacccaaggccttctgcccactggaggaccaccctccgggcctccgatgccccacccccttgtggcccggttgctaggggtagctgcaccttagcaacaggcctaggtctgggctggagtctcacattggagcctggttgctaggggaggtaactctttcctgacaggcctagcgaggcgtagtggctcctcgaatctacctgaaggtgcccaattcaggaggacctgccttctgaagctgcacttgcgccttttgctaaaggggctcaaaagtctgggggtttactgtggtcagatgtggtggctcatgcctgtaatctcagcactttgggaggccaaggcaggcggatcacctgaggttcaggagttcgagatcagcctggccaacatggtgaaacccatctctactaaaaatacaaaaattagccaggtgtggtgatgtgtgcctataattccagctactcaggcggctgaggcacaagaatcgctgcagctgggaggcagagtttgcagtgagcagagatcgcaccattgcactccagcctgggagatgtctcaaaaacaaacaaatggctgggcgcggtggctcacacctgtaatccaagcactttgggaggccgaggcaagcagatcacctgagttcaggagtttgagaccagtctggtcaacatggtgaaaccccatctctactaaagatacagaaattagctgggcatggtggcacgtggctgtaatcccagctattggggaggctgaggcaggagaatcgtttgaacccaggagctggaggttgcagtgagccaagatcacaccactgctctccagcctgggcaacagagtgtctccaaaaaaaaaaaaaaaaaaaaaaaaacaaggaaatggggtcattttgtcacccaagctggagtgcagtggcacgatgacgactcactgcagcctcgacctcctaggctcaagtgatcctcccacctaagcctcctgagtagctgggattacaggcatgcaccaccacgcccagatacttaaaattttttttgtagagatgggggtctcactgtgctgtgttgtctacgctgctctcgacctcctaggctccagtgatcctcctgccttggcctccaaagtgctggaattacaagtgtgagccaccaagcccggccatttttttttttttttttttagagacagggtccagtcacccaggctggagtatagtggagtgatcctggctcactgtagccttgacctccttgggtcaagtgactcttcttcctcagcctcccaagtagctgggactacaggta[138 bp omitted]agtgaaaccccgtctctactaaaaatataaaaattagctggatgtggtggtgcacacctgtagtcccagctacttgggaggctgaggcaggagaattgcttgaacctgggaggcggaggttgcggtgagccgagattgcgccactgcacgccagcctggtgacagagcaagactccgtctcaaaacaaaacaaaaaaccaacattttttccccaggctcagtgatggctcatgcctgtaatcccagaactttgggaggtagagattggtggattgcttgagcctaggagtttgaggccaacctgggcaaaaaatacaaaaaattacaaaaacacaaaaattagccaggcatggtggcacacacctgtggtcccagctactcaggaggcagaggtgggaggatcgcctgaaccctggagaccaagtggcagtaagccgcgattgtgccactgcactccatacagagtcagaccctgtctcaaaaaaaaaaaaattttctttttttttttggtagagcctccctatgttgcccaggctgggctcaagtgatcttcctgccttagcctcccaaagttctgaaattacagctgtgagccactgtgcctagctacaatgaataattttaaaagcgtattccaagtagtacatgtgacatccttttttttttttttttttttgagggcgacagagtctctctctgtcatccagcctggagggcagtgagtggcacaatctccccggctcaagcgatcctcctgcctc[133 bp omitted]aaaacatctgcctcctgggttcaagtcattcgcctgcctcagcctcccaagtagctggaattataggcatgcgccaccgtgcctggataattttgtatttttagtagagacagggtttct[144 bp omitted]cgggctggtctcaaactcctgacctcaagtgatctgcctgcctcagcctcccaatgttctgggattataggcatgagctaccacacctggccaggacatagttttgtttttttggtttttgtttgtttgtttgttttgtttttttttattttgagatgaagtctcactcttgttgccctggctggagagcaatggctcaatctcggctcactaaaacatccacctcctgagttcaagcgattctcctgtgtcagcctcccagataactgggattacaggcatataccaccatgcctggctaatttttttgtatttttagtagagacagggtttcaccatgttggccaggctggtcttgagctcctgacctcaaacgatccacctgcctaggcctcccaagtgctgggattacaggcatgagccactacatccagcctaatctcattaggtttttacagtggggtaggggttatggttcccattttacagaactggcagtggagggtcagagaaaggaatgaggtgaatttcctgaggtcacagggctaggaagggaccccagctctgcctgcttccgggtccattctcttccctcagtgggaaggaattttgatgttggggtgggtggcagtccccgagacagtgtctccccttccctactttcctgcagggcgtggacgagtggatgtggccagcctggctgtggggctgacaggtggcatcctgctcattgtcctggccggcctgggagccttttggtatctgcgctggcgacagcaccgaggccagcagccctgtccccaagagtaagggggcttcagcgaggagggggtggtggtggagagcaggggagggaggaagcattgacctaaagggatgtgctaaggattgggggcaggcaggcactgatgaaagacctaaggacacagtcatttggagagtgagtctgtgagctggcttgtgtctggttttggcgactgtcgctctgtctggatcctcagtacctggcccgcagtaggagctctgaccacttttgctgccagcctgtctttgcggtactgagattaccagtatccgtggaattacgactctggatattgtatctggtgaggctgcgacggtgcagcctgtggtgtcttggtgtctgtggtatgtcagtttcagtggtaacaggtgcagcacctgagtgggtgtgggaaattggtgaggagtgcgtctgtgttgtgttcctgtctatatggatgggctgagttctgtctgtttggtgtgtgttggcctgcctctctacagggctgtctttttttttttttttttttttgagatggagtttcactctcattgcccaggctggagtgcaatggcatgatcttggctcactgcaacctctgcctcccgggttcaagtgattctcctgcctcagcctccagtgtagctgggattataggcgcactccactacgcccagctaattttgtatttttagtagagatgggtttctctatgttggtcaggctggtttcgaactcctgacctcaggtgatctgcccgccttggcctcccaaagtgctgggattacaggtgtgagccaccacgcctggcccttttttttttttttttttttaaaaaaagacaaagtctcactctgttgcccatgttggagtgcagtggccggttcacagttcactgcagcctcaatttcctgggctcaagaaatcctcccacctcagcctcctgaggaactagagctacaggtgtgcgccatgcacccggcagggctgtctttttctctattgctctgcctgtatctggtgcacatgagtgtgtctgaataagagtgtgtctctgtggttgctgatttctgtgtctacctgtctgtgtgcagctgcctgtcatttgaggcgcttttctgtgtgtaaggctaggctgaaggtgaccctccttttctgaagtccacctcccttccagctctgtcccagtgtcaccctgagtctccgtctcctagatcccctctcttcctccctagtctaggtatcctgtaagttgcctctgctaactgtacctttgctgtccccagggccgggctcattagccctctgagtcctttgaaccctctgggcccaccgacgcccctgcctccacccccacccccacccccaggcctccccacctatgagcaggcgctggcagcctctggggtacacgacgcacctccacccccctacaccaggtatggggcgtggcttctgcccgggggcggggcgcagaggggtgggcacgttggaggaggaacctgggctcaggggcgggacttggaatttgggccttcttacctggggcggggcttggagtgcgggggcggggccccatgcaatggtctaggggcgtggcccagcgttgtatgtgtggagccgtataggagggtggggcctgtgcccagagggtcctggattggctgagacgccaagggcggtcggagtggtcctggttgaaggggggagaaaaacagccagatctttgactccctagtgtgcctttcctcttgcagcctcaggaggcctcactgaagagctgctttcgagacccggctctccgaaccgtgcccctgattcataccggattccggaagccgctaggcctcatagacgccgaagctggacttggagtggggaatggtgggagtaggggtcatccggcccgaggcctgccctggcacacgcgtttccgccgcgtatggatatacacatgttttcggcaacgtgttcccgtgtcctggcccctcacgggcccccacactctcctgaccgtgagggcactggtcagttccgcccccgtggtaggcagacgcgcggggaaattcggacccaggagcccagccccggctgtgccatcttgtgtatgggcagatatgacctgacagccccctccagtgccacagggtacgcacacgcagagccccgcctgtgcacacgcgtgtcttcgtgcactccccgtgcggtacaggggcacttcgtaacccagggaaagggcggggggcatatttgcaagcgcgctcggtgcgggcaggctcgcattgcacccagggagctggagttgagctgttcccctaaataaaaacccttcggaaaggagaccaaaaaaagcagaaataatgcaaaaaataataatgaaatgaactgcgatcccgggcgcatcggaactggttttctgtgcaaacgcgccctacacccccaggccctgctcgcgctcagtctctctctcactctccctttttttttttttttttttgcatttgcacgggattgtgggaggaagcggagcgcagccagacaccccgccgcccgcccccccttcccctcccccctcccccagccgccttgtgcaaagatggctgcaccgtgagcgcagaggaggaggaggcggcggcggcggcggcgagagagcgagcacccagcgcctgcacccaccccggggccgcccgggacgccccctcccgagcgcgcgcccccccttttctctcgcaagcgccggggcaaaggcggagacagcggggtccctcctccccccttccctcctctagggggaaccccccttcccccttccttggctcagcgactgcaccccctcccttgcccgcccctccgcccctgccccctccctcccccgcccggggccttcccgggccttcggcggctgcaaagaaaaaaagagagagagaaaaggggggaaaaaaaagcagcagcggagggagcggcggcggaggagagcgcgcgcgcgccccctccctccctccctccctccccctccccccaatttccaccgcggccaattcatggacaggaactaccccagcgccggcttcggggacccgctcggcgccggggcgggatggagttacgagaggtcagcgaaagctaggtaaggagctgagggtggcctagagaagggggccaaggggtgggagcccagccgggccgggccgggccgggccgggcccgcccggcgacgcgtgcatcgcaaactcccctccggcttgcaagggagcggccttcctcggtttgtaacaacgccgccgccccagtttgcaaattgcaaactccgccaaagccagctccggcatgcaaagggagaattgcagcgggaaaatgggggtgcaaaacaatttcggacgggaaggccttgggaaggtgggagggactggcgaagcaaggcctggacttccccccatccttggattcccggcttggtgacccctcccccccgcgccccaggcactgctcttgcaaaggtgggaagaagagaagaattagaacgcagatctggggggcgcgaaccccctctcaggtcctattgttccgggactgtgcgaggccgcgccactaggcgcccccccaagaattccgcgcgcagagtgggcacggggccccgcccccttcctaagctggggttgtgtgtgtgtaagggagggggtcaggcgtctgggacacgccccctttaatgcccccacccccaaaggcagagaatcctagttgatcgcaaggagtggagcgtttgccctcttgagtctggccacggactggtgccgttgcatgggaagagtcggatgtttcccgggtgtgtgtttgtgtgtctgagcgtgggccctgtgcgtgcgtggctggcagcgtgttcacctgtgaatctgcccctttcctgttgcttattggtgtggcgccctcacacttcacctatccccagcacctcccccccaacacacctggatttcccagcagggcataaccccaagtgtgtcaggattttccgtgtgggattcctccgtctatatcttttcttccccacgggtgagttggatacccgtttgcacacatacctggcattgcatgggcccatgcatttgaacctcaacccccggggatggtcggtgttcttgttcacacttgtacctggtactttccccaggtcttattccctcttctctccaccccccaaaccgttgccgcttgggaaccgatcttcctcctgctcccaacttgttctgcaccaccccatgaagttcagggcctatgtgttcccgtgtgtctacggaagaggaggcgtccatgtggacctctggcgttggccccatagcctgtgtcgccggaacgggggctggggggggtttgtggggtcgacgggggagggctctcatttgcaaatcaagacgcttgctctgccttggaccctcttctgtgtgttagtctcgtctctgagcatgcctgtttgtaaacgtgagactatccgggctctctttattcgggctctggagtgggggccatttctgtggctctttagttgagcaccccgattcccttgtgttctcccctttagggcctacggttccttagcttaacaccccccaccccggtcagctggaagggtccccccaactccccggggggttttctgagcttccttctcagaaggcagcttggaagaaccccctgacgtctcccctttccccccagcttggtttatggcagctccaggacctcgcaccccgagacggacatcttacaccgccaggcctatgcggccccccacccactgcaaagctatgccaccaaccaccacccggcaggtacggcccccatcccgccccgctttgggctggccctccccctccccccgaggcagctgattggctgttgaaagttccgcccctcctaattggccgtggcccgtgccgtggcccgccccttgctgtgtctcctctgattggttgcctttgaggctgctggtcgctgcttcatttctcgccggattcgtccgcccctgcctcgcccctcccctttcgctccaattggccctgttaccatcagcccccaaatcccaccttctcttccaggcttttccgcctctccccaacccaccccaattctttccctctgggtttgccctattcttttggctctttggaactctgaattctttcttcctgattccctttcttcctgattggctctaattctctggcccgccctgttttatcttattttgccccattgccttattctacccaccttgcctttgcctccaaggtttctgattggttccctcttcctaggggtactggtaatgacatgatgctgtccagtttgacccttgaccctcctgattggctccttccctttttccctccccatctttttttctgaaccctcccacttagctcaatcctttctgacacgttctctggtctttcttagacttcattgtcccatcctttcctcttccttgctggaaatatccaaatttggtctccctcccagccttactgaggactctgttcttttgctcctggctctttcgcttctagatttttctacacttttgtctaccatttcctacctgggccccctgtccttatgactggattgccccttgtcttgctttactgtctcacctttcccccttccctcccctcattcatgtctcattagcttggttctatccatcttgtttttgaatttgcccttttctctcccatcccctccttttcctgatccaacttgcttttggcctcttccctttctctcttgactgtatcctacccacccccacctggctgactataacccctgtccccggccaggcctctctggactcttcgacactggcctccaccacgcgggctcagcagggcccgacgcctccgtcatgaaccttatctcggccctggaatcccggggcccccagcctggcccctccgcctcctctctcctctcccagttccgcagtccttcctggcaaacaggtaagcccagcgccggccctgcagggccagggtgggactggctcgctgttctctctgacgcgcggtcttcctcatctccagccatgcacacgccaggccccacggagctcttcatctcgggtgccctgccgggttccagcacctttccgtcctcatctgccctgtcggcttaccaacacccggcttccttcggcagccgccccttcccagtgccctcgtccctcagcctccaggaccccccattcagccctccagctaacgggctcctgtcccctcatgacgtgctgcacctgaagccctcgcaggcacccacggtgccctcttcactgggcttcgagcgcctggcagggggcggtgtcttggggccagctggtctcggtccagcccagacccccccttaccgccctggccccccagacccaccaccacctcctcgccacctcccaactcagttcaacctgctggcttcctcttccgctgccgccgccgctgccgagcagtcctccccacagctctataacttctcgggtgctgccccgggcccaccgccgcctgagcgggccctgccacgccaggacacggtcatcaagcactaccagcggccagccagtgcccagcccccaccacccccgccaccagcccatgcgctccagcactatctgagctgtggaggcagctacccctccatgggccaccgggccaacctggcctgcagccccctgggtggtggggagccctccccgggtgctggggagcctagcaaggctggtcccagcggagccacggctggggcatctggccgggccacgggccctgaggcagcagggggcggtggggctgggggtggtggtggaggttaccgccccatcattcagtcgcctgggtacaagacgggcaaaggtggttatggagcagctgccgggggtgccaccaggccccccccaccccgttcgaccgccacccccaaatgtcagagcctgggtgggccagcagccgcctatgccactgggaaggcctctggggctggaggggcagggggccaggcttattcccccggtcagcctcaagggcttctgggaccccaggcctacgggcaagggtttggaggggggcaggcacaggacttgagcaaagcccccagctactcagggggccccccacagccccccagcggcccccctcctcctggcctggccacatgtcagagctactccccggaccagctgcaggggcagctgtatggggtgcagggcgagccatacccagggccagccgcccactcccaggggctgcccacagccagcccctcgctcagctacagtaccggccattccccagcgctctcgggccatgggggtggctggggacccagctccctgggaggcggcggtgaggccagcccatctcacatcattcgtccgctccagtcaccgcctgccaccggccgtccacctggagtcggctctccaggagcccctggcaaatacctgagctcagtcttggcctcagcgcctttcctggcacctccgggagctggcagctatgcagccggagcaggtggctacaagggcaagggggatggctcggagctgctggcgggcccaggtgggcctcctgcggagcgcacagaggatgaggagttccttatccagcacctcttgcaggcgcccagccctcctcggacctcaggggcggacggcttggtgggcgaggacggggcagcagatgcctctaagggacttggggggagtggcggggccgggggaccaccgggtacaccctacgagttggccaaggaagacccccagaggtaccacctgcagagtgtcatccgcaccagtgccagcctggatgagggtgccactgcggcactggagctgggcctggggaggctgaaggagaagaagaaagggccagagcggggtggcgagacccccgaggggctggccacctctgttgtccactacggggcaggcgccaaggagctgggggccttcttgcaaaagagccctccgcccccacctcccacggcccagtctacccagcccactccccatggcctccttctggaggccgggggccctgacctcccactggtgctgcctccgcctcccccccagctgctcccctcggtcctcagccatgcccccagtccctctcccagcgcctccaaagtcggcgtccacctccttgagccagccacccgcgatggggcaccccagccacctccaccgccacccccgcctccaccacccatgcccctgcagctcgaggcccacctccgcagccatggcctggagcccgcggcccccagcccccgcctgcgacccgaggagagcctggatccgccaggcgccatgcaggaattgctcggggctctggagccgctgcccccggcgcctggggatactggcgtaggcccaccaaactcggagggcaaggatcccgcaggcgcctaccgcagccccagcccgcaaggcaccaaggcgccgcgtttcgtgccgctcacctccatctgcttccctgactccttgctccaagacgaggagcgcagcttcttccccaccatggaggagatgttcggtggaggggccgcggacgactacggcaaggccgggccacctgaggacgagggggaccccaaggctggcgctgggccaccccccggcccccctgcttatgatccctatgggccctactgtcctggccgggcgtcgggagccgggcccgagacaccgggcctgggcctggaccccaacaaaccgcctgaactgccctccacggtcaacgccgagccgctgggcctgatccagagtggcccccaccaggcggcgccaccacccccgcctccgccaccgccgcctcccgcgccggcctccgaacccaagggtggcctcacctcgcccatcttctgctctaccaagccaaagaagctgctcaagacatcctccttccacctgctgcggcgccgcgacccacccttccagacccccaagaagctgtacgcccaggagtacgagttcgaggcggacgaggacaaggccgatgttcccgccgacatccgcctcaacccccggcgcttgcctgacctggtctccagctgccgctcccgtccggccctctcgccactgggggacatcgacttctgcccacccaacccaggacccgatggcccccggcgccgtggccgcaagcccacgaaggcgaaacgtgatgggccaccccggccacgggggaggccccggatccgccccctggaggtcccgaccactgcggggcccgcctcggcctccacgcccaccgatggcgccaagaaaccccggggccggggccgaggccggggtcgaaaggctgaggaggcagggggcacccggttggagcccctgaagccacttaaggtgaggggaaat[138 bp omitted]cccgggttcacgccattctcctgcctc[211 bp omitted]gtttatggccgcaccttggcatttttggggcagggggataataaggtttacatttctaaaatctgtgaggaagttagcgtgaggaatttcagggtctcactgacagaaagacctaagaattgaaattctgaatctaggctgggcagtgtggttcatgcctgtaatcccagcgctttgggagactgaggcgggaggatctcttgaacccagatgttcgagaccagcctggtcagcgtagtgagaccctggtctctattaaaaacacaaaaatttagccaggtgtggctgcgtgtacctacagtcccagctactcaagaggttgaggtgggaggatctcttgagcccaggagttcaaggctgcagggagctatgattgcatcactgtggcctgggccacagagtgagaccctgtctcaagagataaaggaaattctgggtttagggagagaggcaggaggttggagcttacgctggtttgaaactcctgacctcaagtgatttgcctgcctcagtctcccaaggtgctgggattacaggcacgagccacctcacccggtctgcttgcttttagtttctatatcccaaaggatgggcattcagggatcctacattcctgggtctcatgggaagcgggtctagggacctgaactgggctgtaagtgaagaggctcagtgagtccaagttcctggtcttctgagggaggaactccagtcttgtcctcctagaatctaagacaaggggtctgcaggtttgaattctataaattcacaggctgagcacctgtaaatttggatttttgggggctgagggaggatgggactgggggcccaggctactgggccctcacggcccgccactcccatgtctagatcaagctgtctgtgcccaaggctggcgagggtctgggaacctcatcgggtgatgccatatcaggcactgaccacaacagcctggactcgagcctgactcgggagaagatcgaggccaagattaaggaggtggaggagaagcagccggagatgaagtcgggtttcatggcctccttcttggacttcctcaagtcaggcaagcgccacccaccactctaccaggcgggcctgacgcctccgctcagccctcccaagagtgtgccaccctctgtgccagcccgaggcctgcagccccagccccctgccacccctgctgtgccacatcccccaccttccggagcctttgggcttgggggcgccctggaggctgcagagagtgagggtctggggcttggctgcccttcaccctgcaagcggcttgatgaggagctgaagcggaacctcgagacgctgccctccttctcctcggatgaggaagactctgtcgccaagaaccgagacctgcaggagagcatctcctccgccatctctgccctcgatgacccaccccttgctgggccaaaagacacttccaccccagatgggccgcccttggcccccgcggctgcagttccagggccaccccctcttccggggctccccagtgccaacagcaatggcactcccggtgagctctgggcaggtggtctgggagtagagcttaaaggttattatgatcactaggtaacagttgtgcaggttacgcactgtttaagagacaccattcacatacatggtgtaagcttgcgtgtttatgaagggactttcctgattacacaagcattttgaggaaggtctatctttttctaattcactcagaggtgctaagtggactaggaggggccccaaggcagacactggagaatgcagggagacagggcaggtgataagttacagggacaggacaggggctactcaggttctgaatggtgggaggtgtgggaactgaggagggctctgagtcaactgtgtgtgaaggtacagaaagatgtctgggggcagagaaagacttggggatgggggtgggcggtggaagggaaggctaggggcataggaagggtttaggttgtgctctggttttggacacagtttaaggagtgtaatgtcagaaacagaggcattgggaaatgagaggtgggagcttacaggagggcacagaggggagtgttcaaaaaaaaaaaaaaaccatgacaggccgggcatggtggaccacacctgtaatcctagcacactttgggaggctgagacaggaggatcgcttgagcccaggaggttgaggctgcagtgagccatgattgagccactgtactccagcctgggtgacagagcaagaccctgtcttaaacaaaaaaccccaaaaacaaaacaaaaagaccctataacgttcttttttttttttcttgagacagggtctctctatgtcacccaggctggagtgtggagtgcagtggtgcgatcttggctcactgcaacctctgccttccgctcaccgcaacctctgccttccaggttcaagtgattctcctgcctc[134 bp omitted]cagcctcccaaagtgctgggattacaggcatgagccaccatgcctgccctctgtgaggttcttaaaaagcctgaagaagggagctggcagacaggggagaggttagcagtctgcatactggtgagcaggccaaggaaaggacaaagatggtcctggagggaggaggatgaggccttggaggaagaggaggtgaggaagtagagttagggaggtgatgatttaggagttgggagggtcattcaggaagaggagttaagaaccagacaagggctttaagaccacaaagagacattccaggactgagaaggggattagggataggagacaggtctcctttgcagccgcaggagccagagtaggtctctggagagactctgatagggtagaagggacactgggagctgagtggtagttacagaggggcttttggtatagaaagcagtgtttaaaggacaagaggaaaggtgccaggaatgatgaataacatccaggcctgatgtccctgtctcccccagagcccccgctgctggaggagaaacccccacccactccacctcctgccccgactcctcagcctcagcctccgccaccccctccgccgccacagccagccctgccctcgccacccccgctggtggcccccacgcccagctcaccaccgccaccgccgctgccgccgccacctccaccagccatgccctcgcctccaccaccacccccaccagccgctgccccactggctgctcctcctgaggagcccgccgccccgtctcccgaagaccccgagctgccggacacccggcccctgcatctggccaaaaagcaggagacggcggcagtgtgtggggagacggacgaggaggccggcgagagtggcggagagggcatcttccgggaacgggacgagttcgtcatccgtgctgaggacatcccttccctcaaggtgagtcccagccttctccagaaactgggcctgatgggtttggtcacctgtttgttgagtgcccgctggatgacaggcttgtgctgagacctgcagatccagtcgtggccgggccgccctggaatttgcagtcctatggggctgatagaggtgtcgaggacctgcgggcctcagaggtgttatttgcgtttgtgtctgtacatgcattacctgtatataaggtaaagcgattgttaacgcgtatgtgtctatatgtgcgttacctgtatataaggtgaaccgcttgttaatgtttatgcagataccctgctgtgggtggtagaggaccagtactgtacaagcagatgaggctctggccctagggagcttctagtttaatggaaccagccagagaggcgggctgctttgccatttatggcacaatggtggaaatgtgtcattgacatagactacctgcagatacacacttatgtaacctgtaaatataatcatgaattgggccggacgcggcagcttacacctgtaatctcagcactttgggagtttgagaccagcctaggcaacataatgaaaccttttctctcaaacaaacaaaaaaagtgaatcatttaggaatggttattgtgtgtcaggccatatctttttgtttttttgagatggagtttcgctcttgtccaggctggagtgcgatggctcaatctcggctcactgcagcctctgcctcccaggttcaagcgattctcttgacttggcctcccaactatctgggactacaggcgcaggccaccacacccggctgatttttgtgtttttagtagaaatggggtttcactgtgttggccaggctggtctcgaactcctgacctcagatgacccacctgccttggcctcccaaagtgctgggattacaggtgtgagccactgtgcctggctggccatagcttcaatatttaccttaaatacttaaatacgtaaatgcagaccaacagcctgttcactgcttccagtttgtctaccgcaggagcttgaaaactatggcccctaggccaaatccagcccactgcttgtttttgcaaataaagttttattggcacacaaccatgcccattcatttacatgttgtctatggctgtttttcccatatggcagagagctgggtagttagctggccctcaatggcaaaaaatatctctggctcatcatgaataaagtttgctggcctctactgtactgggttcactggacaaatagagttggatcagaggattaatgtgcaaggcacttgacaggggtaggtgttaccaggtgcccatggagtgctctgcacagggcatgcggctgagcaggtgctcaggaggtcagcccattctcaccctgatggtggcatggacgccaaggccattctccatgtcaatcattgtcattgattgtactgattatgatacaggattattgtttggcccttcgtgtacagtgtgacatttaatcttggcggggcatggcggttcacgcctgtaatcccagcacttcgggaggccaaggcaggtggatcacttgaggtcaggagcttgagaccagcctggccaacatggtgaaaccccgtctttactaaaaatacaaaaaattaactgggcgtggtagggcgcacctgtgatcccatctactcgggaggctgaggaaggaggatcacttgaactctggggtggaggggggaggttgcagtgagctgagattgtgccactgcactccaacctgggcaccagagcaagactccatctcgaaaaaataataataataataatttagtcctggatgttgttttaatttaatcttcgatgtgacatggagaaattatgggaagaattaattattaattataaggataataactatcattacacttttttcttttcttttcttttctttttttgagacggagtcgcccaggctggagtgcagtgacgcaatctcggcttactgcaacctctgctgcccgggttcaagcgattctcctgcctcagcctcctgagtagctgggattaccagcaagtgccaccacacctggctaatttttgtatttttagtagagaaggggtttc[131 bp omitted]ggcaaactcaaatgtattttttcctgtgttatttcaatctatttcattgtgggaaaagtaaataatagagcaggccgggagtggtggctcacacctgtgatcccagaactttgagagactgaggtgagaggctcacttgaggccaggagtttgagaccagctaggcaaatagcaagacctcacatctaccaaaaacaagggagcgagactgtctcaaaaaaaaaaaaaaaaggatattgacatcgtaggccaggtgcggtagctcacacctgtaattgcagcactttgggaggccaagacgggcagatcacctgaggtcaagagttcaagaccagcctggccaacatgatgaaagcccatctctactaaaaatacaacaattagccgggcatggtggcaggcgcctgtagtcccagctactcaggaggttgaggcaggagaattgcttgaacctgggaggcggaagttgcagagagccaacatcacgccactgcactccagcctgggccaaaagaacaaaactctgtctcaaaaaaataaagaaaaaaagaatattgacattgttaaatgaccgtcaccaccatccatctccaagttttatctttttatataaaataaacttgattatagagactactagtagcgttttacagggatggaaactgaggctcacacaggttaaaaagtccttctgattggggatttctatgcccgttttttctgagacagggtctcccttgttgtccaggctggaatgcagtgacgtgatctcagctcactgcaacttctacctccctggttcaagcaattctcataactcagcctctcgagtagctgggactacagaggatcccaccatggttggctaaattttgtatttttagtaga[143 bp omitted]ggcacagagagataaagtagccttcccaggcttttgtagcttgggatccacacccagccctgctggccctaggaatccgtattcttttttttgtttgtttgagatagtgtttcgctcttgttgcccaggctggagtacaatggtgcgatctcggctcaccgcaacctccacctcccgggttcaagcgattctcctgcctcagcctcccgagtagctgggattacaggcatgtgccaccatgcctggctaattttgtatttttagtagagatgggatttctccatgttggccaggctgctctcgaactcctgacctcaggtgatctgcctgcctcagcctcccaaagtgctgggattataggcatgagccactgcgcccagccaggaacccatattcttatccccgactcagccatgcaccgtgtacgttctagtcaaacgcagctgagccagcattgggtcaaatgaacagggccctggggcagggactttgaccatccccattttacagatggggaagttcacgttcagagaaagggagtcagtcgcctggccagtgccaacctgggattggagccagggccacctgacaccacctcccagctggcacggggcaggggagggggccaggcgaggactcagatgcttaaaatacaacttgagtgtgcattataatgggggcaaagccccacgcctttgccaaatgtacagaccttggggactcatttgtgggcctagagatggggcaggctgctggcatagttaagagcccagctttggtttaacctgactgactcaaatctctgccacttattattattttttttgtgtgtgtttttgagacagggcctcactcttatcacccaggctggtgtacagtggcatgatcatggctcactgaggcctcaaactcctgggctcaagcgatcctcccacctcagcctcccaagtaactaggactacaagcatacaacaccatgcctggcaaatttttttattccttaagtagagactggggtctcactctgttgtcctggctggtcttgaactcttgggctcaagcagtcctcccgtctcagcctcccaaagtgctgagattgccggtgtgagccactgtgtctggacttttttttcttcttttttttttttttgagacagagtctcagtctgtctcccagggtggagtgcagtggcgcaatcttggctcactgcaaccctcgcctcccacattcaagcgattcttctgcctcagcctcctgagtagctgggattacaggcgcgtgccaccacgtcaggctaatttttgtatttttaggagtttcactgtgttggtcaggctggtctcgaactcctgacctcgtgatttgcgccgcctcccccgccccccaaccttggcctcccaaagtgctgggattacaggcatgagccactgtgcccagcccatttttttcttttataccatctctctttttttttttttttttttgagatggagtctcgctttgtctcccaggctggagtgcggtggcacaatctcagctcactgcaacctccacctcctgggttcaagtgattctcctgcctcaccctcctgagtagctgggattacaggcacctgccaccatgcctggctaatttttgtatttttagtagagatggggtttcaccatgttggtcaggctggtagaaaccactcttaaagcccctacaaaaacaagccatagaccattgtttattccagaaaaacagcaatccaatataaatatcacctgagccatatatgtgattttaaatgttttcattcctggtttataaagataaaaaagataggtgaaattagccataggtggccaaagtgctgtaatctcagcactttgggaggacgaggcaggattgtttgagcccaggagttgcagaccaggctgggcaacattgtgagcccccgcctttaaggaaaaaaaaaagaaagaaagaaattagccataggaatgcattttatttaacctaacatattgaaagtattatttcggctacatgcggtggctcacacctgtaatcccagcagtttgggatgttgaggtgggaggatcacttgagcccggatgtcgaggctacagtgagctatgattgcaccactgcactccagcctgggcagcagagtgagcctctgtcatgtacgtgtgcacacacacacacacacacagagtttcagcttgtaattaataaaaactattaatgatgtttttgccaggcgtggtggatcatgcctgtaatctcagcactttgggagtccaaggtgggtggattgcttgaggtcaggagttcaagaccagcttgggcaacatggcaaaacgccccccctacaaaaaaataagaaaaattagccggatatagtggcatgtgcttgttgtcccagctacctgagaggctcaggtgggagaatcgcttcagcctgggaggtggaggttgcagtgagccgagatcgtagcactgcactccaatctgggtgacagagcgagaccctgtctcaaaaagaaaaaaaaaaaagaaaagctgttggccaagcgtggtggctcacgcctgtaatcgcagcactttgggaggctaaagcaggtgagtcacctgaggtccggagttcaagaccagcctggtcaacatagtgaaacaccatctctactagaaatataaaaattagccgggcgtgggggtgggcacctgtaatcccagctactcaggaggctgagacaggagaatcacttgaaccttggaggcggaggttgcagtgagccgaaatgacgccattgcactcaagcctgggcaacaagcgtgaaactgaggctcaaaaaaagtaaaagaaaaactgttaatgatgttttaatattattaaatggggtattactaaaatgaaaagttaagaggttttacattcttttttgcataccaagacttcaaaatcctgtgaatactttgtactcgttgaacacatccattggaccagccacatttgaagtgctctagccgacatgtcaccccagtcatggtggctcaaacctgcaatcccagcacttcgggaggctgaggccggcagatcacttgagcccaggagtttgagaccagcctgggcaacatagtgagaccctgtctctacacaaaattctttttttttaaaattttttattttttgagatggagtctcgctctgtcaccaggctggagtgcaatgacgcgatctctgctcactgcacctccacctcccgggttcaagcgattcttctccttagcctcccgagtagctgggactcctgcctcagcctcccgagtagcgcagactacaggcaagtgccaccacacccagctaatttctgtatttttagtagagacggggtttcaccatgttggccagggtggtctcgatctcttgacctcgtgatccgcccgacttagcctcccaaagtactgggattacaggtgtgagccaccgcgcccggcctctacacaaaattcaaaaaaacttaaccagacatggtggtgcccacctgtagtcccggctactggagaggctgacgtgggagaatcacctgagcccaggaagttgatgttgtagtgagccatgattacaccactgcactccagcctgggtgacagtgaatgtgaccctgtctcaaaaaaaaaaacaaaaaaaacaaatcaatctcaaaagctcaagaaccacttgtgggaacgagctgctgaattgacagggccaggctagcccattctccttcccccgtctgtcaactgggactgttgttggggttgtcataagggctgggcagcgtgtatactccaagcatgtaagagttcactgggtggagactgggcacagtggctcctgcctggaatcccagcactttgggaggctgaggtgggtgaatcgcttgcgctcaggagttcaacaccagcctagtcaacatggcgaaatcctgtctgtactaaaaatacaaaaaattagccaggtgtggtggcacatgcctatattcccagctaccctagaggctgatcaccggagtttgagaggtcaaggctgcagtgagccaagattgctcgattgcactcccacctgggcaaccggagtgagaccgtctcaaaaaagaaaaagttgtctgggcatggtggttcgcatctgtaatcccagcactttcggaggtcaaggtgggtggatcacttgaagtcaggaggttaagatcagcctggacaacatggtgcaatcccgtctctactaagaatacaaaaattagccggacatggtggcgggtccctgtaatcccagctactcaggaggctgaggtaggagaatcacttgaattcaggaggcggaggtttcagtgagccgagatcatgctgctgcactccagcctgggccacagagtgagactgtctcaaaaaaaaaaaaaaaaaaaatttgttggatggagaagagtatggtgttggggttgtccaggcagaggaaacagctgtgcaaaggccctgtggtgagggaaagcacgctgtgtttgaggtgtacagggatgcaaggtgttgaatggctggacagtgaatgctgaggctgggctggtgggctgggcccagccatgttggacttgggtgcaggggtgagttccatgggtgctgatgaagacattaggctctgtgccgtttagagcccctggccagtagggaagtgactggggagttgttcaagcctggatagtactctgtccacagcctctgtcctgggacggactcccctgtcaatgggaccctgcagttttctttttctttcttttttttttttgagacgaagtctcgctcttgtcccccagactggagtgcgatggcgcgatctcggctcactgcaacttctgcctcccaggttcaagcgattctcctgcctcagcctcccgagtagctgggattacaggcgcctgccaccacacctggctaatttttgtatttttagtagagacaaggtttc[131 bp omitted]atcgagtctgagtgtctgtagctcagtggcttacatccgcactgcttacaccacatgtcttagcttgtcgcagttcagtttctcagaagaaaatctgattggttctgctcagcctatagggccaagatgaggtcagtggctgagtgcagtggcccacgcctgtaatcccaacacattgcggcctgaggtgggaggtttgcacgaacctgggagttgggcatgccatggtaaaaccctgttcctattttttttttttttgagatggagtctcgctctgttgcccaagctggagtgctgtggcgcgatctcagctcactacaagctccgcctctgggttcacgccattctcctgcctcagcctctcaagtagctaggaccacaggcgcccgccaccacgtccgtctaattttttgtgtatttttagtagagacggggtttcaccatgttagccaggatgatctcgatctcctgacctcgtgatccgcccgccttggcctcccaaagtgctgggattacagatgtgagccactgcgcccggccttttttttgttttgttttttgagacggagtttcactctgtctcccaggctggagtgcagtggcacaatcttggctcgctgcaacctctgcctcccaggttcaagtgattgtcccctcagcctcccgagtagctgggactacaggcatgcaccatcatgcccggctaatttttgtatttttgtagagacggggtttcaccatgttggccaagctggtcttgaactactgacctcaggtgatccatctgcctcggccttccaaagcgttgggattacaggcatgagccactgcgcctggccatgaaaccccattgccacaaaaaatacaaaaattatccaggagtggtggcgcatacctgtagtcccagctacttggtgggtaggtggctgaggcaggaggatcacttgagcctaggaggccataggtaagctatggtcatggttgtgccactgcactccagcctgggtaacggactgagagggtctcacaaaaacaaagaacaaaacaaaaaaggccaggcacagtggctcacgcttgtaatctcagcactttgggaggccgaggcaggtggatcacctgaggtcagcggtttgagaccagccttgccaacctggtaaaaccctgcctctactaaaactacaaaagattagctggccctagtggcaggtgcctgtaatcccagctacttgggaggctgaggcaggacaatcacttgaacccaggaggcagagatttcagtgagctgaaatcacgtcac[367 bp omitted]tcacccctgtaatcccagcactttgggaggcccaggcgggcggatcatgaggtcaagagatcgagaccatcctggccaacatggtgaaaccccgtctccactaaaaatacaaaaattagctgagcgtggtggcatgtgcctctagtcccagctattcgggaggctgaggcaggaaatcacttgaactcaggagatggagg[131 bp omitted]aaccattgagtaggaggctgtgggccaggccacttttctagtaatcggcagttggcatggtcagtgatatgagtgacatgatgagaggcaggatgggtggggcttggggattgactggccctgtttggggaacgggcaaggctgaagtcagggtgaggcctgatgactgggtgtggggtggggatgctgggaggaaaagtggtttgatggaaggtaccaagcccagtgagaatgtgctagccagagggtctgatcccagctacagtgtcaacagcttcctgagaggtcaccaacaccgggagtgggagggggcagaggtaggggtggtctccttgggctgacaagatgctccaatggcttcctcaagctgctgctttttctttttgagacagggtcttgctctgttgcccaggccagagtgcagtgctgtgatctcagctcactgcaacctccacctcccgggttcaagtgattctccttccttagcctcccaagtagctgggagtacaggcacgcactaccacacctggctaatttttgtattttagtagaggtggggtttcaccatgtaggctgggctggtctcaaactcccgacctcaagtgatcccacctcggcctcccaaaatgttgggattaaaggtgtgagccactgcactcagcctggccccccttttaaagacatgttccttccagggactctttttggcatccgtcacctattccaggaagcattcttggattcagtttaaatttgaggacaagcgcggtggctcatgcctataatcccagcactttgggaggccgaggcaggtggatcacctgaggtcaggagttcaagaccagcccggccaacatggcaaaaaccccttctctactaaaaatacaaaaattagcctggtatcgtaggtgcctataatcccagctactaaggaggctgaggcaggagagtcatttgaacccaggaggcgcaggttgcagtgagccgagattgcgcccctgcactctagcctggctgactgaggctccatctcaaaaaaaaaaaaaaaaaaaaaatctgaggcccctcctctaggcttctgtagtgtccagggaattggcattaggacatttatgacttgtactattatttcttgtgtccatatttcgcgcctctgctgcccttttagtcctcaaggtcacatgctcagtgtgactcacgtccatcagttgccatcgcccagctggggcacacacaaactgcagggtggtggtggttggtgttcaggtgtttgtggggcagggggagcagagatagggagccttcctgttgctctgtcttccctgctgtggacatgctggtgaaatggtctcaggtaacctcacctgcctgttcttggcacaggccacaaactcaccctgttttgtttatttgcttgtctgtctcattacctctgttattacctgagaaggctttttcagtgtcttagactcctcaggttgctataccagaataccatagactgggtggcttataagcaacagagatttggctgggcttggtggatcacgcctctaatcctagcactttgggaggccgagccgggtggatcacctgaggtcgggagttcaagaccagcccgaccaacatggagaaaccccgtctctactaaaaatacaaaattagtcgggtgtggtggcgcatgcctgtaattccagtgtctcaggaggctgaggcagaagaatcggcttgaacccgggaggcggaggtcgcagtgagctgagattgcgccactgcactccaacctgggcaacaagagcaaaactccgtctcaaaaaaagaaaaagtaaaaagagaattatgtggggggacagtcagaccacaacaggacgtcttgctcacaaccgtactctcctgtccagcacagtaaatagcaggcggtgttcaaagattgtcattactctgagtcacacaggaagttttgggctttcaccccgtaaagcaatagtgactcaaactctacagcctgagaacgagcagcccaatccagggtactgggtgggcaggaggcgacagggtcaagttcaagctgtacacagagctgaacacatcatgggggtagaagatatttgttgttgacgtgtctgccttttctctaaggggatggtgagggaagccagtgggccagggcgtaggggcagtaggtctaggaatgagggctgaccctgctggcctcaccacacccctcctcctcagctggcgttgcagacggggcgtgaacccccacccatctggcgagtccagaaggcccttctgcagaaattcactccggagatcaaggacggccagaggcagttttgtgccaccagtaatgtaagcctgcaaaggggaccaaggacttgggggccccggggcgtggtatctaggagctggggttccccttagtgtggctgtgactcactccacagtgtatctggaagggggccccctgctgccggcaggctccaagcagctgccatggtggcccagggcacgggggtgttggccatctggctgggcagtgtgaagaatttcctcatgtgcctctttctccccatagtatttggggtattttggggatgcaaaaaatcggtaccagcgcctctatgtaaagttcctggaaaatgtcaataagaaggactacgtgagggtctgtgctcggaaaccctggcatcggcccccagtgccagtcaggtaccaaccatgggggacacaggggcaggtagtatgtagcgccgacaggcatggggatgcggcatgcaagagagaaggctggagagtggggggtggggacagagagaggagacagagcccagagagagagggggacagagacccggagagaaatagggacagagacccagagaaggggggatagagacccagagacaggaggggaacagagacccagaggtggggggacagagacccagagatgggagaacagagaaccagacgcatgagggagacggagactcagaaggagacagagacccagagaaaaagagggacagagatgggggaggacaaagatccagagacagggagacagagacccagagacgggaggggacagagactcacagaaggctacagagacctggggtggacagagacccagaaagagggggatagagacccagagagggaggggaatagagacccagagagggagggggtcagagacccagagagggagggggtcagagacccagagagggagggggtcagagtcccagagagggagggggtcagagtcccagagagggagggggtcagagtcccagagagggaggggaacagagaccagagagaggaggggacagtatgagagaagctattcctgtgcctagggcactgagcagggaccctgaggagaatttggattattgggggctgctgactacagtcccttctctgttcccttctagacgctctgggcaggccaagaaccccgtatctgctgggggtagctctgcacctccccctaaggccccagcaccacctcccaagcctgagacccctgaaaagacgacatctgagaagcccccagagcagactcctgagacggccatgcctgagccccctgcccccgagaagccctccctcctgcggcctgttgagaaggaaaaggagaaggagaaggtgacacgtggagagcggccattgcggggtgagcgggccaccagcggacggcagacacggccagagcggagtctcgccacgggacaacctgccacatcccggctgcccaaagcccggcctaccaaggtgaaggctgaaccgccccctaagaagaggaagaaatggctgaaggaggcaggcggcaacgctacagcaggcgggggcccaccaggcagctcctcggactcggagtcctcccctggagcccccagcgaggacggtgaggccctaggcagcctcagggctgcaggggtgggtggggaagggacacaggtgagggctgtccagagggctccaggtagccttggcaggacagtaagaaccagtatgttacagataatggcagtagctcacagtcacggggcatctcactacacgacaggctgcctcctgagaagctgatggatgttaacttgtgtaattttcacccatcctagtaggtagatactgttatcctcatctacagatgaggaagctgaggctccaagagagggcagcacagtctgtgttgggtgcccagcagagttgcaactgagcccagggtgcctcggactctgttcttcagtgctgcgttctgcctcataataggcaagatttgagggctgaggaagatgtgggactaggcagctgtcctggaggctctgtgatggtggggtttcctgtgaggccctgggtgaccctgagaaagaggcataacctcttgtgccttagtgacctcacctgtaaaatgggttcataatagacgaagctcataggagagtgccaatctttagtagacactacctgtctactccatgtctgcccagcacactgccacatcctcagtgcttatgatgatgtctggttaggccgggcacagtggctcgcgcctgtaatcccaacactttgggaggccaaggtgggcggatcagctgaggtcaggagttcaagaccagcctgaccaacatggtgaaatcccggctttactaaaaaatacaaaaattagcccagcatggtggcgtgtgcctgtaatcccagctactcaacgaggctgaggcaggagaatcacttgaacccgggaggcagaggttacggtgagctgagatcaggccactgcactccagcctagatgacagaacaagactccgtctcaaaaaaaaaaaaaaaagtctggttagtgatgacaataacaacaacaaaaataaatatatattcacatatgtacagtaagggtaacagctgatttttgttgagtgtttactatgtaccagaaatcattttaaacatttgcacacaggcttacttgacctttacctaataaaccccgtgagatagcttggtagaattatcctcattttaaagatgggggctgggtgtggtggctcgcaccggtaatcccttcactttgggaggctgaggtggtagactcacttgagctcaagagttcgagatgagcctgggcaacatagtgagaccccgtctctacgaacaaatttttaaaaattagctgggcttggtggtgaatgcctgtagtcccagctactcaggaggctgaggcagaaggatcacttgagcccatgagttcaaggctatggtgaggtatgattacaccactgctttccagccagggtgacagaattagaccctgtctctaaggataacttcttaaataaataaaagatgaagaaactgaggcaccaagaggtgatggtacctggtcagggccacacagtacaggggtagctgttttaacagagattagaattagcgagtcaaatgaggaaggcggaattgtctttccatcaaagccctgatatagcagggagatgtatagaaaataaaagcggccgggcacagtggctgatgcccagcactttgagaggccgaagcgggcaaatcaccttaggtcaggagctcgagaccagcctggtcaacatggagaaaccccgtctctactaaaaataaaaaaattagccgggtgtggtggtgcatgcctataatcacagcgactcgggaggcggagccaggagaatcacttgaacctgggaggcagaggttgcagtgagctgagattgcgccattgcattccagcctgggcaacagagggaaactcggtctcaataaatgaatgaacgaacgaatgaatgaatggctctttttcagggttgtccagggtcccagtttccttctctcttgttgaccggctgtttgccttgttgctggggtcatgacccctttccagtgagcccaagccctgtttctgcccctggccaccccacagaccttccccaacacccccaaatcccatcaagctctgtgtcctggcttccccatcttagggaccggacctctggctacacagtcacctgaccagacttcccaggagccatcctcacctcttttccttttcttttcttttttttttgagacagagcctcactctgtcacccaggttgaagtgcaaagtggtgtaatttcagttcactgaaacctccacctcctgggttcaagtgatcctccttcttcagcctcccaagtagctgggactatagatgtgtgccaccatgcccggctaatttgtgtatttttagtagagatgaggtttcaccatgttggcccaggatggtctcgaactcctgacctcaggcgatcctctcgcctcagtctcacaaagtgctgggatcacaggcatgagccactgcacccggccttcctcttttctttttctacctgtcgcccccacagctgggcagctcccagccctgtccgcccccatcccctccaccctttcccaggcctgcccagctcagcctcgtcctctgcttccagccctgccccaccttcattcgttcctacctggtccatcagcctggacttcagcctcactcctccagtctgtcccctgcttggcttaggagggatctttctacgcttacactcaccccttccctgctctcagctctctcatggctccctagtacccaccagaaaaagcccttgccctttctgcctggtgttggaggcccagtgtggtctggcctgcactgacctgtgcaatgccagctcccatctcgtccctcagccttgcccctttatgatctgacctccctggataccctcttttggaaaccaacaatgctgctgctttagacttacgtgaagccacaattaagtgctctgagctatcactcaaggc[132 bp omitted]ctcaccgcaacctctgcctcccgggttcaagcgattctcctgcctcagcctcccgagtcgctgtgattacaggcacgcaccaccacacccggctaattttgtatttttagtagagacagggtttctccatgttggtcaggctggtctcgaactcccgacctcaggtgatccacttgccttggcctcccaaagtggtgggattacaggtgtgagccaccatgcccagccctttttttttttttttttttttttgagacggagtttcgctcttgttgtccaggctggggtacaattgtgcgatctcggctcaccgcaacctccgcctcccaggttcaagggattctcctgcctcagcctcccgagtggctgggattacaggcatgcaccaccatgcccggctaattttgtatttcttagtagagacggggtttctccatgttggtcaggctggtctccaattcccgacctcaggtgatctgcctgcctcggcctcccaaagtgctgggattgcaggccacagcactttatgggctacaatgcctggctttttttttttttttttttttttttggagacgagtttcactctgtcacccaggctgtgcaatggcacaatcttggctcactgcaacctccgcctcctgggttcaagccgtcctacctcagccttccgagtagctgggattacaggcgtgtgccaccacgcctggataatttttgtatttttagtagagacagggttttgccacgctggccaggctggtatcaaactcctgaccttaggtgatctgcctcggcctcccaaagtgctgggatgacaggcgtgagccactgtgcctggccttctctgagcttcttgcagtccctgtgattctgccacaagagcacgtggcactggcgcttgcctgtcaatcttccctagcggacttggacctcccaaaagcagggatttctcttccggtccccagtgttgagaacagtgtctgccacacaggtggtctcagaggaaattgggataacgagcctgcgtcctgtcttttctgcagagcgggcagtacctgggcgtctgctcaaaaccagggcgatgcgggagatgtaccggagctacgtggagatgttggtgagcacagcacttgacccagacatgatccaggccctggaggacacgcatggtgagctgaggcctggggaggaggggggggggctgactcggtctgagggagcaggtgctgagggcttggacgtgatgtgagagaggagaggtttggggtcgggactcctgagtctgagggaagaggagctgaggcctggacctgggtctgagagaggaggggctggggcctggagtcctgggtctgagggaggaggtccctgggtcctagggagaagaggctgggggcctggactcctgggtctgagggagaagaggctgggggcctggactcctgggtctgagggaggaagggctgggggcctggactcctgggtctgagggaggaggggctgggggcctggactcctgggtttgagggaggaggcgctgggggcctagactcctggttctgagggaggagaggctggacctggactcccaggtctgaggaaggagggactggactcccgggtctgaggaaggagggactggggcctggactcctgggtctgagggaggagggactggggcctggactcctgggtctgagggaggaggggctggggtctggactcctgggtctgagggaggaggggctggggcctggactcctgggtctgagggaggagggactggggcctggactcctgggtctgagggaggaggggctgggggtcgagggcctgggggtctggactcctgggtctgagggaggaggggctggggcctggactcctgggtctgagggaggaggggctgggggtctggactcttgggtcagagagaggaggggctgggggtctggactcctgggtctgagggaggagcggctgggggtctggactcctgggtctgagggaggagcggctgggggtctggactcctgggtctgagggaggagggagctggggcctggactcctgggtccgaaggaggagggggctggggcctgtacttttgtctctgagtgggaaggggatttggggacccagactccatgaccccaccttggccccagtgctttgtgaggctgtggccttcctgataccatgtcctcgtccatcagacgagctgtacctgccccccatgcggaagatagacggcctgctgaatgagcacaagaagaaagtcctgaagcggctgtcgctaagcccagccctgcaggtgcctgggggtctgggcagggggtgtctggggcccagggtccacatggagaagacatgtacgtgtcggccgctgttggcgggggtgatccttggaaggagatcgtccttctgggctcagatgggagaaaagttgagggcaggactgtcaggagatctctgggttctcaacagccatgaagcccatgtggggaggagctgtgggccttggggcagcagaggggtggttgtgaaaggctgggctgttgtttcggagaacaagtgtgcagccaaacatagactaggcctgcacccaaagcgggcactggaccgatggcttctttgtgagtccaatgcaggctattaggatcccaggcttcagtgttaagtcatctgtatgatttcccttctgggatattctgggatggaatatcagggctctgaaatccagtgttaaactggctctgaggattctggttgggatgttagtgtggcactgagaattccgggatagaatgttagggtaactgagacttctggaatcgaatgttattctggctttgagaattctggaagacttgcagtgattctgagaattctgggatggattctaggctggtactaagaattctgggataggctattaggctggtgctgagatggctggtgggaagttagtcttagaaaatacgcaggaaggccgggcacagtggctcacgcctgtgatcctagcactttgggaagccaaggccggtagatggcctgaggtcaagagttcgagaccaccctggctctctcaaaataaaaaaaagtgaaaccccgtctctactcaaaataaaaaattagctgggcgtggtggtgggcacctgtagtcttagcttccctggaggctgaggcaggagaatcagttgaacccaggaggtggagcttgcagtgagccaagatggtaccactgcactccagcctgggcgacagagcaagactgtctccaaaaaagaaaaaaaaaacaggccag[134 bp omitted]ggcgtggtggcgggcgcctgtagtcccagctactcaggaggctgaggca[153 bp omitted]gagagaaagagagagagagagagatattaatatgactgagaattttgagtgagatagtagttttctcagaatgatgggtgggacgttgggatgaccgagaattctggaatggattcttagactggtgtggagaaatctaagctggaatgttatgctgactctgaaaattcgtgggtagagtgctgggtgggttggaaaattctgggtagcattaggttataaaaactctggaggatatgaatctagtctacaaattctgagatggattgttaggctggcactgaggattgtgggtgagatgttacactagggtagataatcccagtgtaggatattagagtaggtctgagaagtatgtgttattagtcgggagttagaattctgggatagatggctgggcgcggaggctcatgttggtaatcccagcactctaggaggctaagggaggtggatcacgaggtcaggagaccaataacaacccatcctggctaacatggtgaaaccccgtctctactaaaaatacacaaaaaattagccgggtgtggtggtgggtgcctgtagtcccagctactcgcgaggctga[140 bp omitted]gatagggctgagaattctgggatagatggttaggatggggccaataattctgggatagatggttaggatggggccgagaattctggggtaggtggttaggatggggccgagaattctggggtagatggttaggatggggctgggaattctgggatagctggttaggatggggctgggaattctggggtaggtggttaggatggggctgggaattctgggatagctggttaggatggggctgggaattctggggtaggtggttaggatggggctgggaattctggggtgggtggttaggatggggccaggaattctggggtgggtggttaggatgagaccgagaattctggggtaggtggttaggatgggactgagaattctgaggtaggtggttaggatggggccaagaattctggggtaggtggttaggatgggaccgagaattctggggtaggtggttaggatgggaccgagaattctggggtaggtggttacgatggggctgagaattctgggataggataggtggttaggatgagactgagaattctggggtaggtggttaggatggggccgagcattcagggataggtggttaggatggggctgagaattctggggtaggtggttaggatggtgctgagaattctggggtaggtggttaggatggtgctgagaattctgggataggtggttaggatggggctgagaattctgggatagatagttaggatggggctgagaattctggggtaggtggttaggatggtgctgaaaattttggggtaggtggttaggatggggctgggaattctggggtaggtggttaggatggggctgagaattctgggatagatggttaggatggggctgggaattctgggatagatggttaggatggggctgggaattctggggtagatggttaggatggggctgggaattctggggtagaattttgggtgacattgagaatctgagccaggccagaaggcacagtggaagcatcactggtcaggcccagcctcctctgtcctttgaggagactctagttgtctctcctgatctgcagcctgggggaaactgaggcacagatctgagacctggctgttgggtttggggtttatggatccagggcagcatccagctgacccattggcttcccgcaggatgctctgcacacgttcccacagctgcaagtggagcagagtggggagggctctccggaagagggggctgtgcggctgcggcctgctggggaaccctacaaccgcaagacgctcagcaagctcaagaggagcgtggtcagagcccaggtgggcactggggctggggctgggagtggggagtgctggcggtatgtgggaagggaggagaggggctgccaagtgccgggctggaggggctgaggcatctccactcctacccaggagttcaaggttgagctggaaaagtcgggatactatacactctaccattcgctccaccactataaataccacaccttcctgcgctgccgggaccaggtgagccccacccacagcacccatcgccctgggattccaacctttctgacttcctcttgggatctgagggtccaagcccagccccatcctgcctcagacccaagagttcaggtccttctgtcttggacttaagaatgcagcccccagccctggtctccctgggacactgacatctgacaccccaggccccatgccccagccccttccctccccagaggccggtgtgccaccctccccagtgccatgtttgacccctgcagaccctggccatcgagggcggcgccgaggacctgggccaggaggaggtggtccagcagtgcatgcggaaccagccgtggctggaacagctctttgactccttcagtgacctgctggcccaagcacaggcccacagccgctgcgggtgaccccgccccagcttgtgaggggggcgcctcctccatgaaccgagaattgggacagaaccgtgtcctcaggagctaacacctgggctccatcgccggggaaagggggtcatgggtcagggtgtgtctgtgctgccccctccagggcagggttcaaagtccgactccccccctctcccaagccccctccactccctccccattcctcccactgttcggtgtacagagaaattatttatatatatgtataaatgtctatttagtaacggtttccctctccccttgccccgaccccccctccacagccacagcccccgccccctccaccttgtacataatgtataggaaaagtctatgtatggctggggggggtggggtggcttcagagagctgggggaccccttccccccaagtcccccctgcaggccaagatctttgctaaaggccattccctccgcagggcatttggcgtcgggtgggaggggaaaacgcatcttgttaattatttttaatcttatttattgtacatacctggggcaggggcttggggaggtggaggggggagaagggtcccctctctctgcccctcccactccttttctacggcgatttgtctgtgtctggcccccacccactgcccatcccccattgttgtctggatgtggttctattttttatcggtctcctttcccctcctccccgttctcgcccccgccccaccccctgctcccactaccctttgtctcttgctctttcttgggcttctgtacaactcaacttgtatacactgtgtacacacaaccagccaaacgaaaacccaacggcaaacactttaccggcaggctggagtgcctctgtcctgcggcgctggagtgggtggcagtggtagcaggggcagaggttctggaacgggactttcccagagccctgggcagtggggggcctgaggctggcatatgttctgtgtccccgcacagcagagtatcccaccctgaaatttaatgacttcagacaacaaatatttatcactggggggtttcttttgttttttagctaaagacagggtctcgctctgtcacctaggctggagtgcagtggcatgatcatagctcactgcagcctccaactccctggctcaagcgatcctcctgcctcagcctcccaaagtgacgggattacaggcaagtgccactgtgcctggccctgtgttctttatgttacccaggctggccttgaacttctgggcttaaaagatcctcctgccccagtctcaagtagttggcatta[132 bp omitted]ccccggttcaagcgattctcctgcctcagcctcccaagtagctgggattacaggggcctaccactacatccagcaaatttttgtatttttagtagaaaccaggtttcaccatgtcggccaggctggtctcgaactcctgacctcaagtgatccgccagcctcagccttccaaagagattacaggtgtgagccactgcgcccggcctcaagtcctgtattcttgaatccaagtgagtggtccatggtacagcactcttggagttccccaagcacttgtataaatgtagaatcggcacaggcagcagacgaggagagggcaggttgaatagggctgtttctcctcctcccacccttaaaggaaaagatgtagaatctcaggctgttgctctggtctacttgatcagaacccactttttagtaaaatgccgagaggattctcaagcacattcaagtttgaagaaccgtgttctagaacaagaatgttaaaaatgtgcaggttggctgggcacggtggctcacggctataatcccagcactgtgggaggccg[134 bp omitted]gaggctgaggcaggagaatcgcttgaatccagggggcggaggttgcagtgagttgagatcgtgccattgcaccactccagcctggctgacagagcgagactccatctcaaaaaataaaaaatgtggaggtcaactggcaatattttagaacccagtctatgaagcagtgaacaggctgttgtcattctagagcctggatggatggaccactggtgttccagaaccctggcttagtccgtgggtagggacccagtgtgagatttgagggtggaacatcagcattccagatgcccttttaggtgagattcagggagaaccctcatcgttctagaaccttgagtattgttccaggggtgtccaaggagagaatacagtcatgggttcttagtttctgttgtaccagtaaagccccttcctcatccctcttttttgtttattactagagacagaaactaaaaaccatggcttcaggctgctaaaagcctaaaacaaaacagaacaacaacaaaataaggtgggttggacaaatctggactctagaccatcacatgttacagatttttttttttttttttttttttttgacggaatctcgatctgttgcccaggctggagtgcagtggcgcaatctcggctcactgcaagctccgcgtccagggttcctgccattctcctgcctcagcctcccaagtagctgggactacaggcgcccaccaccatgcccgactaatttttttttttttgtatttttagtagagatggggtt[133 bp omitted]gactagaggatggatagtagcatttgagaaccataatgggtgagtcaacaatagaccatgaagccaggcgtggtggctcacggttgtaatcccagcactttgggaggtggagatgagcggatcacctgaggtcaggagtttgagaccggcctggccagcatggtaaaaaccttcttttttttttttttgagacggagtctccctctgtttcccaggctggagtgcagtggcactatcttgactcactgcaacctccgcctcccaagttcaagcgattgtcctgcctctgccttgtgagtagctgggataacaggtgcatgccaccactcccggctaatttttgtatttttagtagagacagggtttcaccatgttgatcaggctggtctcgaactcctgacctcatgatctgcccttcttggcctcccaaagtgctgggattacaggcatgagccactgtgcccagccaaccctatctctcttaaaattacagaaattagccaggcatagtggcttgtgcctg[142 bp omitted]ctagaatcattgagttaagagggctgagtacaaaccattattgtgcttgaactgtggcctatagcatgtgggggtgcagcctttgatggaaagccatacattcaaggtcctggactagactgtcaaactgaggccaaatgccaggtgacagtggctcatgcctataatcccagcactctgggaggccaaggcaggaggattgcttgagtccagcctgggcaacatggcgagatcctcatgtctccagaaaaaaaaaaaagctaaaattgaggccaaaggattggcattgtcccaggtcagagttccaggatggaaaacgggtggagtattctttttcttttttctttttgagacagagtctcgctttgttacccaagcttgggtgcagtggcatgatcttggctcactgcaacctccgcctcctgggttcaagccattcttctgcctcaagcttcctgagtaactgggactacaggcacgtgccaccaggtccaattaatttttgtgtttttagtagtgacgggatttcaccatgttggccaggatggtctctaactcctgatctcaggtactccacccgccctggcctcccaaagtgctgggattgattagaggtatgagccaccgcgctcggccgggagtggagtgttgtgagcgtggacagtgaggtcaggaatcatccctttagggacagaatcaccttgtggttggcctttggcatccagctgcccagattagaatcccagctgcagcactaaccaggcagattgggtaacagaccccatcttcacctttgccatccattaaatgggcttttgtcaaaatgaaggaagacaaccggtttggagcacctggcctgcagctcctgtgacctgtagcaggagatctagagaagcttaacagaggtccacaacatgacagaaaacaaagagacacagagaaagataaagatggggacattggccgggcgtggtggctcacacctgtaatcccagcactttgggaggccaacgtggatggatcacctgaggtcaggatttcgagaccagcctggccagcatggtgaaaccctgcctctactaaaaatacaaaaatttgtcgggtatggccgggcacagtggcttatgcctgtaatcccagcaaattgggaggccaaggtgggacgatcatctgaggtcggaagttcaagaccagcctgaccaacatggagaaaccccgtctctactgaaaatacaaaatcagccggggtggtgcgcatgcctgtaatcccagctactcaggaggctgaggcaggagaatcgcttgaacccgggaggcggaggttgcggtgagccgagatcgcgccattgcactgcagcctgggcaacaagagtgaaacactgtctcaaaaaaaaaaaaaaaaaaaaatttagtcgggcatgcttgccggtgcctgtcatcccagctacttgggaggctgaggcagaagaattgcttgagtctgggagatggaagttgcagtgagccaagatcacgccactgcactccagcctgagcggcagagtgagactccgtcttgaaaaaaaaaaaaaaagatggggacatcaaaacctggaaagctttagaatcgttgctagggcctgccagagctcaggggaggggaggaaccgaatacataatttctggcactaacagtacctagggagatgccagcctttttgctgttgtgtgttgatctttgggacactggtggctgtaaaccttccaaaaatggtctgccagttgtcttgagcatttggggggcaagcggtaactttaatcaccttctcaaagtgcatcttggtcctactagaagcagggtgccccagccaagaagttggccccatcgggcagtgcaggaaagactctgatcctctgcagggggcatgtggatggtgagatctgggaagagagatgttggcacaggactccttcctgttgggggctcagtacccgcagctggggcttaggtggaagtgtcagagcttgtttggaaactgatcaaaacattgcccaccctcttgccccaccactccccatccagcaggggtggacccctggtgtgcagagttcctagcagggaagagagccaacatgtgacagtacatccgagctgtactttttcccagggcagaaggttgagaacagg[135 bp omitted]gcaacctctgcctcccgagttcaagcgattctcatgcctcaccctcccaagtagctgggattacaggcgcccgccaccacacccggctaatttttgtagttttagtagagaggggggtttcaccatgttggc[131 bp omitted]catggttctggggcagaatggagacatgtcagccacagtcattgatggtgagcacttagtatgcgccgggctcattcctcctctgcaatcgtctcctttagtctcgtgctcaccctgtgaagtagctttgtacttacccccattttacagatgagactgaggtggcagagctggatttgaattcaggcatcccggtcacgcaaaggccatgctccaccctaggactaggaagcaggttccagggtgggtgcgagtagagcattcagggatcaggggcctgggtatagggagcagatgtttgactgctgataggtttcaggtggagcctcaagttcagggcatcgggacatctcggttgaggtgttttgttttgtttttgttttttttgagatggactctcgctctgtcgtccaggctagagtgcagtggcgcaatctcggctcactgcaactccacctcctgggttcacaccattcttctgcctc[133 bp omitted]cagcctcccaaagtgctgggattacaagcatgagccaccgcgcccggccggttgaggtttttagcctggtgtgttgggtagatttggggctttaaagatggccggtcacacaggcttgggaggtgggtggacagtggtctccagttggcttcagccttccagggtagcaaatagtgggcaggactgctcctcccccaaccagagcttaggttggatgtgggagagtcctaagtgtccccaggctgggcatggtggatcatgcctgtaaatcccagagctttgggaggccgaggcaggaggattgcttaaagggaggagttcaagaccagcctgggccacatagcgagaccccatctctacaacaaaatgaaaaattagccaagtgtgcactcgtagtcccagctacttgggaggctgaggcaggaggattgcttgagcccaggaggttgaggctacagagttgtgatcacgcgactgcactccagcctgggcaacacagtgacaccctgtctcaaataaataaataaaatgtaaaaaacgaagtgttcctaggacacagatgggctttgggtatccagactgaagtgtgtcatccatttacccactgtggccttaagacacccaacacttctgcttctcccaggacagaatagggggttggatgggggatgtccacactgaccccaaattggattaagtgtttagattcagatttcagtgctactgggaactttctgaaaatgaggacttgccagacggctgcttggacaccattccacccacctgtcccttctcgatatacattgaaggtgagagtgggacaggcagggtttgtagcagttgctccctgtctctatttttgtagacagagtctagctcttgcccaggctggtctcaaactcctggcctcaagtgatccacccatttcggtctcccaaagtactgggcttacaagcgtgagctaccacacccagctgagttgctgcctgtctccaatgtcctagaacgttctattggaatgttctagaaagcactatccaatagcccactcagcaatgataggaatgttgtctatctgccctatctattaagatagccactagaggctgggtgcggtggctcacgcctgtaatcccagccctttgggaggccgaggtgggcagatcacttgaggccaggagttccagaccagtctggccaacgtggcgaaaccccgtctctaccaaaaatacaaaaattagccgggcatggtggcatgcgcctgtagtcccaggtactcaggaggttgaggcaggagaatcacttgagcccaggaaacagaggttgcagcaactggagatcctgccactgcactccagcctgggtgacagagcgagactcttgtctaaaaaaaaaaaaagtcactagccacatgtgacaactgaggtcttgaaatgttgatttgactgaggaactaagttttattaaaatattttttattttgttgttgttgttgtatttgagacggagtctcgctctgttgcacaggctagagtgcaatggcacaatctcggctctctgcaaactccacctcccgggttcaagctattctcatgtctcagcctcctgagaagctgggattacaggcgcccaccaatgcgcccggctaattttcgtatttttaatagagacagggtttcaccat[136 bp omitted]ttgagacagtcttgctgtcgcccaggctggagtacagtggcatcaccttggctcactgcaatttctgtctcccaggctcaagcgatcctcctacctcagcctcctgagtagctgggactacaggcatgtgccaccacacccagctaatttttgtatttttggtagagatgggggcgggggggggtctcactttattgcccaggctggtctcgaactcctgagattaagcgatctgcccacctcagcctcccaaaatgctgggattacaggcataacccactgcatccagccaaattttatttaattttaatttaaatagccacatgtagcttctgcctaccatattgaagagcgcattctataactttctaggaaaaaaaattccttcatcagatgttcaaagtttatcccaagaaaatacccataaggtcaagagattgagaccatcctggctaacatggtaaaaccccgcctctactaaaaatacaaaaaataaattagctgggggcgtggtggcatgcgcctgtagtcccagctactcgggaggctgaggcaggagaatggcatgaacccaagaggcggaggttgcagtgagctgagatcacaccactgcactctagcctggctacagagtgagactccatctcagaaaaacacacacacacacacacacacaaacagaaaagggtagaatcgccctgttgaagggaaagtggggggtctaggcacttggttatgctttataaacttcttctgctcctccccaagcaataggttctagatgcgagggttctaggtggagggaggccttagaacatgtgtgccctgaattcgttcaccttcccagagttcattcccccaccctttttttttaagagatgggggtctcgctatgctgcccaggctggtcaaaaactcctggactcaagcggtcctcccgcattggcctcccaaaatgctgcgattacaggagtgagccacagtgcccgaccctcattacctttttagaaagcacctcctgacgttggcagtgacatttatttttctgggggaggggagttatatacagcagtgacccggagcccctcacccccaccaggcttaggtggggacaggaggcgttggcagaaggcacacagtggcagtagcccagaagaggccaggaagtaagggtgggtatgtgatgtgtcctgggagacccagatgaggaaattgaggctcagtgagggcctcaggtcacacagcaaggtgcgaaggcagctagtcccgagagcttgtggtggttgcttctctcttgcctgggctacaggaggacgcaggggcagcccccgcccttcttcctgggggcactgggagggctcggtgggagctcttgttcctggtatttcctgtgggaaaacgccagtgagtttggagtggaagggctggggacaaggacgacaggaaggggacttggctcaccggacagcccgcaccagctgctcaaaagcctcgtccacgttgagacgcagtttggccgaggcctcaaagtaggccacgtggtgggaggcgccgaaggcagaggcttctgatcgggggacctgggggtaggggggacacgggggagtcaggtccctgcactcagggtgaccgcagccagagagacagacaggcaggctggatactctaggagaggtgacccactgtgagaactcaaagaggaagagctcctgagagattatggagggagatgccgcaggggcttggtgtcttctaagtaagggatgggggcaggcttcgtgggcacttgccctgctatgccttagataaccaggagtgggcaggcagggaagtcagggtgttcccggcagaggcaggcggaaccccaaagcctggaaatccccagagcctttgccagatggatgagttctgtgtggaaatcgttgtgggggaagtgatgggagcagggaaaggaggggcgcaactgtgcggggcatctggcacctggggaggaactggggagccatggagggggccggccatgagcaggggaggtgctggggctggtgggaggttggctggaagggaggaatgcgaggaaggggcaaagagagctggcggacggggggtgaatgtcctttgttccgtccagcagcctctcctgaggacacttgcatgctaggccctctgctcggtgatgccggggaccctgaaggtccagtttgggggtaacccatctaggtgagctgtgtgacagtggcagtcgcagcactgcaggaacagaggaggatgctgatgggggacaggtgtgctggaaggagcctcccagactgagatggggtccccagaaagaggggtgtcccgaacctggcgctgtgactccagatctgccttgttcccgaccaacacaacggggaagtcgtcgcggtccttgacccgcagaatctgcgtgaagagcttgcccacctcgttgaaactgcgagtgaagccggaggcatgaggtccagccagctgcagagcccaggtcctccccacacccacccactgctccgccaccagcaacccctgtcacctctgccggtcgttaatggcgaacaccagcaggaagccgtggccagcacgcatgtactgctctctcatggccccgaactcttcctggcccgcggtgtccaggactgcagagacagggagaggggccatcgtggggaccaggctccccgcagtcacccccaagagccctcagcccccactgacaccacccccatccatcatccatccttgccgccctcactgtccagccgggctgggatgccatccacactgcagatcttcgtgtaggagtcctcaatagtggggtcgtagtcagacacgaagtaggactggcggggtggggagaggatagttactgcagtgccccggcagacaggacgaagccctgcccttgggatgcctctctcagtctctgtccctctctctctaaatgtctgtccctgttgctgggtctctgcccccttttctctgggtctctgtcccgtctgtctctctgagtcttttttttttttttttttttttgagacggagtttcgctcttgttgcacaggctggagtgcaatggcgagatctcggctcactgcaacctccgcctcctgggttcaagagattctcctgcctcagcctcccaagtagctgggattacaggcatgcgccaccacacctggctaattttgtatttttagtagagatgtgttggtcaggctgtgttggtcaggctggtctcgaactcctgacctcaggtgatccgcccgcctgggtctcccaaagtgctgggattacagatgtgagccactgcgccctgccctgtccttctctctctctccagatgtctgtccttgttgctgggtctctgcccccttttctctgggtctctgtcccctctgtctctctgagtctctattactctctctctctgggtctctgtccccttctctttgggtagctgctcccctgcccccctttccctgccccccacccctcctaccagtcttcttctctctgagtcactcctggtcctctctttctggtataaggtacatgtcccacatcgtgattacatcctagctgtgtgacactgaacaaatcacttcccctctctgagcctcagtttcctcatttgaaaaaggaggctaagaacagcactacactccatccagcactggcaagattcggagcaaaaccccattaaatattgaatgtatcagttatcggaggcgttgttgtccagactgcctgtttatatctctccctcctcttctgcttcctccctctcttcctcctcccccgtctcctcctcccccgtctccttctcctgctcaggcggcctccagcgtctcctcccaggggaaggtcccggttccaatccggctgcggagaggctgccccaccctcgggccccagcccctcccttcctgcctgggtcctgcccgctgccagccaagcctttggccagctctgggactgcctctgggtgcaaggggcccagggctggggcctttctctacacaagcagggcttcctcccaggcccttgaaggggtctcttggtgggggtgaggggggtgtcctggggccccggggcctctgcggtagcatgtcaggccaagacacttttctaggatttctttgaagctgggaggacctccctcaggaatggggaggaggtttcctgggctggggtggaatttcaggaaagggggtgatgtggaggctaggggtctgaaggctgcatctgtcggttagaggggtgcttggtgaggggcttgtcctggagggaggctgtaaggatcaagccctgggagggattgtggctctgggggtagttaggggcgtgacctcagagcacagcgtgagaagctcagggctgagaactgggagccagcccggaggtggctcaggggttttgggaggttatagtatatacagtcttagaaacattgagttcatttatggggtcagagaaactcccaaggaatagatctttctgggggtgccaagaatctgggggcttcttccatggagatgatttgagagctattcagggtttctgagaggggctcagggagttgcagcggagaaagcatgggatggaggaggggctggttttccttgggggtggggtgggagagtggaggtttgggcctccgggaatgggggattgtcaggacttggggtcttggagatttctggaatggccaaggggcaggatgtctttttaaatctcgggtcggagagcaggactctcttaggactgggtagtcccagaagagtctcagggccagggtctgggtagaatttctagattctgggggcagtcatggaaggggctaagaatcaaacgtggggccgggcacggtggctcatgcctgtaatcccagcactttgggagtccaaggcaggccgatcacgaggtcaggagttcgagaccagtccaatatggtgaaaccccgtctctactaaaaaatacaaaaattagccaggcatggtggcactcgcctgtagtctcagctacttgggaggctgaggcaggagaattgcttgaatccaggaggcagaggttgcagtgagccaacatcgcaccactgcactccaccgcactccagcctgggtgacagagtgagtgagactctgtctcaaaaaaaaaaaaaaagaaaaaaaagaatcgaacgtggtggaatctcaaaggtgctgggcactggcattctcccaggaaggctctcaatggcttagaggggaagttggggactgggatttgggggagatagggctcagggtggtggaaggtggcaccaagggcgtggtgggggtcctgggagtgcttagggtccgaatggggtgagtattttgtatttagcatgctcccaggaggtgctcaaagccaggtcagcaggtaagcggggtcttaggcactgggagagggaatagtgggtctcgggatgcgagtgcagaaggaagggtcccccgtgcaggggatggaggctctccaagagtttaggttacaatctgtggggatcttttaagattagagggccttataggagggtctcagtgatgggtcaagggggaaaaggggtctcggggatccccccaagggctcagttctgggtcccgggggacaccctcccgggtgagggcccactacctggatgaactggatggtcagcgcgctcttgcccacgccgccgccgcccacgaccaccagcttgtgtgtctcgctgggcggggggtccccgggcccaggtcccccgccccggggccgcccccgccctgtcccggacgccgccccgctgctcatgtcgccaccgctgctgctgccttcgctaccgcctgcgggggagccgggcgggacccgggggggcgggctacgctaatgaggctactgcataatcatgagctctggcaaggagggctcgcgtctccggacacttaaggagggggacgggccaaagaaagggaggagctatgttaataagggaaagggaacggcgttcgctgcgaaggggaattccgaatgaggcggggctatgctaatgagagacctgtgctttgccctgagcggcgccacgcgctctcagcgggagggcggtctgtgggcgtggctatgctaataagaatttattctttcagcagacggggcggaaagttcctcaggggaggggctatgcaaataaggacccctgtgacactgctgcttggggcatcgtctccgaggccttagtatggtaggcggagctcgtcgactcgcgcgcgcggccgtatatagggcgctccgaggaagcagcaggttttgaggagtagctccacctccctcctgggatcctagccaagctttcgaccccggcgtctgggttagaagctagagtctccgcccgctaagggacccaggcttccggttcccgctgtcccagccaagcggaagacagactgggaggagagtggggccctagagggggacagcagggtaacggggcagggaggggccgtgagatcactgcattcctaatccatgagccagctcgcccaagtagggatgcctgggtcatgaagagcctggggccaggatttctgggtcttgaaggagaaggaagcagagggcccagactcctgggtccttaggagaaaatggggctggagatgtggactcctgggtcctggggaggagggtgtcagggaggaaggtagacaggttccttcgtactaggttcggtaaaggagggagccgggggcctggactcttaggtccaggaattggagaggctggggacccaggattctggatccgagcgagggcactggcttggggggacccgaattcgtatgtgagagcttgagaccaggactagtctgggagaccgactcttggatccgaggaaggaagaatcagactcctgagtcggagggaggagggaaataggagtctggacactgctctgagtgagaggattcggaattcagacttctctgtactgaacgaggcggctatggggtcgggcttctaggttctaagtttatttttatttgtttatttttgagacggagtttccgtcttgtagcccatgctggagtgcaatggcgcgatcttggcccactgcaacctccgcttcccgggttcaagcgattctcctacctcagcctcccgagtagctgggattacaggcgttagccaccacgccaggctaatttttgtatttttagtagagactgggtttcaccatgttggtcaggctggtcttgaactcctgatatcagatgatccgcctgcttcggcctcccaaagtgctgggattacagacgtgagccaccgcgcctggcctatttttatttttttagaggcggggtctccctatattgcctaggctggcttctaacttctaggctcaagccatccttccgcctcagtctcccgagtgggactacggtgtgcgccactgcatcccgtctggttctaaatttaggggggcctagaggatctggattctgagagccccagaatgtgggcagcacaacatccagcaagtcgtgctcactccgccggactacaattcccttgcgtctgttctgcctggcgcctcttacgtcacctcctgttccgccaccctttccgcgcgcgcgcagggcactgtggggcgtcatcgcgggctaccgcggccccgcccacttcacctctcaccccattagctgtccccgcgcgacagaggcggtgcgcggactacgcctcccggcgtgcatcgcgcggaccccgccccatgtgtcccattggcttctgggaaaccgagtgcggttgccttcccgccggccttcacgtcgccgtgctcggtacttgaaatcccggcaagctcggcggcgctttagctccgcctctctcctcctttgctcacgaaccccgccccagcccgccccgccccgcgccggggccggagccgcagcccgagcggcggggtaagatggcggcggcagtccgggccgcggggctcgggcctattggggtgggcggggcggagttgggtcgctagttgtcccggggtcctccccacaagccacgggtcctagagggcttctcggggcggtctcgggcccggcagctgcggcgaaacctggcgccgagaggggggccttctcagggccccgggacgcatccgtgggttcctgggggcgtctatggggcgtctccgagaggacttggggcgtctctgggcctagaccgagcctaaggcctgccctccatcacacagctggcctggatcgtgtctgtagacactgtagattgtctttttgggctgaccggaggctagggtctggttagagggttctggggccatcttgagatcttgagatatgtcccaggggtgaaggagggtctgcaagacctgaagagtatcttcagagccatctagaggcctggggtatgtcttttagggctggaaagtgtctgcatgggctggcctgaggatgcaactggtctgcataagtctggggccatttatcaggcctagaaggagtgttcaagggctaagaagtcatttagggccccctagggggttgggttatgcccaccagggaagggcgccaaatattgagatgtactgagggtctggggtctccaaggtatgggtagtgtctaataatgggtgacaggaggctgggggcagttagaaggacctggaaccatctagatggctttaatgtgactgcaggaatgcagttttgatgcctggagcaaattcgaatgcctttggggtcagagcagcttgtggcgaataataatacggaaagagaatgaggaaattttgcccagcttagatatacttgcccttcagacagtaattcaaatgaaaaatgttttaagattctgcattaccctgggggttattgagagagttagaattaatctacattagtctggaagagtctggagggtcatctagacccactattacagtgcttttcaaggggaaacctgggccatgttgaccgtgatctgcattaagatacattttttcattgagacctggtacagacagtcataatgtatttaacattatataacataatgtattaacattaactcaccttccacgaattgacatttccacttactacttgtgctgtgctgtgaagaactattttgttctatttactttttaaaacaagctatttgtgaagcactaaactggtatatgaccctgttgttggggaaaccactgatccagataggacctagcagtatctgcagagcattcttctgttcagaagatctcagtagctgagggtgtgtctgcgaagcctggtgctttctaaatgagcaagcaagcatctttgtatactgcagagggtttggggatccctcagcctgtagtcagcagatgttgattaagcttctgatatgtgacagtcactgttgtaggtagcatgtgcttccccgggaggtgctggagagcagttccagggccaggaactggggctgagcttattgagtattggtgaaagaggctgggatgtaatagactatcagggttgggtgtgtcttaggaagttaggaattaggtggagctgggaggctgaatatggaggcttggcatggtttgaaaatctatatgggatctagaacaggaccagggccttgtctttgcaggcatgctgtgggggaagcgaggagacagatgtaggggaaacctgggcgttaagggctaatagtgtcattcctcttcatccgtattgagcacttgaggtgctctaaatgtgtggcagaagtcaggctttgagtattcacagccattctctgagatagatgctcctatttcgtgcatttacaattaagcatactgagttgtgggttagggattttgaagctttctaggaattttgagattggatattgtcttatgagtagcagatttgacagtcatggggaagcttacagctgaaatattcatatttttctgaagccctaatcaagacatccacctgtttgatggatgatctttcaactgcctgactggggaatcatatcaaagaatttccatgacattgcaaaggctttgtgcagatggcgataggtaaatgcctcctgtgaagttttccttcggcatgtctttctgaagtttagcgttttcattttaaaaatggcatactggttttgcagatcactcaatgaagtttccaacttaggtgtataaatacaatttgggggtggtcctcaccatcgaggacagttgatgctctaggaagccgtgtggtgtttaaggcatggtgttgaatattgcccagcacattggccttgggaaaggtgggtttataggactgtggaacacaccctttgaaatcacagtgcagcacacacaaaaaaccttggtgttggctttgcctcttaggaggccagggaatgaggtcttgaagtttggataggttgttggggaagctgcgggaattgaggagtgagatgttaaaagcggaggccagggaggcctccctttgacataagaggcacctgagacccagaaaaaaggaagagaattgctcctagtccctggggtgtctgtgctgggtccagcgcccacccaagcacagggtggagtgggaggaggtggaggagaggaggggtgccagaggggatgctgagggagatagtgtggggcccttgaggtcttcatgtctatcctctacttccatcctttctcccgggacctccactccaaactctcccccctggacccccaggtgaccatggaggaagaagatgagtctcgagggaagacagaggagtcgggggaggatcggggcgatggtccgccagacagagaccccacgctttctccttctgcctttatcctggtgaggctgctgggctcctggcactgagggatggaggagctgggcatccacactccaggggcctgactccagggcctgaggcaggggcgctggactcttggctcccttgaagcacttgagtctagctgtcagtgtctgggatgtctgtctcccaaggggcagaggttgcaaagcatctgcctgggtcctctgacgcttggttcttccccccttccccagcgagccatccagcaggctgtgggaagctccctgcagggggacctgcccaatgataaaggtatggcggcttccggttccttttagcccctgccccctctctgcattctttatcctaatgtcattcatacaagcttttctgaagcctcctgggtgccacccttgtgctggcatggggagccaaaaatgggcagacaccctgtagctgccttggaagggcctagtgtgcagtggaagggagacaggcacagtgctgggagagggcaggaggcccacttgagctagcatggtgggagacgggtcagggcaccttccccgagcagggacagtgaacggctctctaaggacctagaagagtctaaggacctaggattagagggaagcctgatcagctgcagcaggcctacagcacgggtgcagcggcgaggggctgcgctgggcttccttggggctggcatgcaggagggtgtgagtggggttgggggaggcaggagaggtctgtggggactggatcccagcaaggcctgaatgccaggttgaggtgtctgagggcagacaggaggacgaatggctgagcgtcgcagcctctgaagtgggtgctgggaagtcctcctgggaggtggcgcatggaggcctggagagcatgcgggaggctggttccgctgtcaggaactagatcaagctcctctttcctctaccccgcaagtctctgcagcaagtcccctgtgtccaatcccccatgcaaatctctcaccagatggctctcggtgtcatggccttcgatggcggcgctgccggagtccacggtcagagccccgttcccaggaatcagggggcactgacacggctactgtgagtaagaagagggggctgggggcctggctcacgggtatcagggaggaagggatgggggcctgagtctgggggaatggggtttggggacctggactcctggctctgcgatgctgaccaggggcaatgttggagagtctgggggcctgatctgtgggcctgagctttgagtgttgatggcagtcaggctataggaattagatcctcagttttcttggggatcttagatgtctgggttcctgagaggttagggagtggggaagcaggatttgccagtcttcatgtgaccagggacggcgtagagcctctctggcctcttccaggtgttggacatggccacggacagcttcctcgcagggctggtgagtgtcctggatcccccggatacctgggttcccagccgcctggacctgcggcctggcgagtgagtagctgggcagctggagtgggagaggcctcagcgtgagagccagaagcacccctgaggctcacccaccccttccgccttgcagaagtgaggacatgctggagctggtggctgaggtccgaatcggggacagagatcccatccctctgcctgtgcccagcctgctgccccgtctcagggcctggaggacgggcaaaacgggtatgtggggccagggcggagctgggcaggtggtcgtggagttgtgtggggatcggctgtttttggtagtgatggtagcggtgatcatgttatttagacaaaacctttcccttctcttcgtattagacgtgattaaggctgtaggcgcatacagatgtacataaagtaaaaactgatgtgctggggctatgtgggagtggtcagcgtgtgtgacaactggtttcggcacgctaagtattagtgtcactgcactgggcgttcatctccccaggagggggactcttcgaatctctatcttcagagaagcagacagcctgaaaaagggcaggcacttgcccaagggcgcacagccagatgctccgtggggtgcctgggccttgagccctggtgtgtctgagtctgaagcccaagtttttgatgtctgagatgtgcgctgcccaaggaggaatctcttcctccaaccccacacacaacggtaaccctgtgagccctttagaccaaacgcgaacgcacatctcagttgcaaggaggacttgttactatgcacatcactgggcccactcccaagagttctgattctgcaggtctggggtgggacctgggaattttcattttaaacaatacatgctgctgagccctggactctgttgagaaccctgggtttaggccttccttctacgtgaacatctgtatttggaggaggggttggagggagaggagaagaaggtgcagtcagctatgggcaccagctgtgagccgtgagcaccagttctgtggtagagcaggcacaccactctgtgccaggtcatgtttaccttgtttaccttgtttcgctgtgtcgcccaggctggagtgcagtggcataatctcagctcactgcaacctccacttcccgagtacaagcgattctcctgcctcagcctcctgagtagctgggactacaaggtgcatgccaccacacccagctaattttcgtagttttagtagagatggggtttcaccatgctggccaggatggccttgatctcttgacctcaagtgatccgcccgcctcagcctcccacagtgctgggattacaggcgtgagccactgtgccctgctaccttgtttgttttttttgagacagggtctcactgcgtcccccaggctagagtgcagtggcacagtcacagctcactgcagcctcaaattccccggttcaagttatcctgttgtctcagtctctggagtagctgggactacaggtgcatgccaccatgcctggctagtttttttttttcttttttctttttttgagatggagtcttactgtgtcacctaggccggagtgcagtagtggggtctagtctctctgcaacctccgtctcccgggttcaagtgattctctcctgcctcagcctcctgagtagcagggattataggtgcgcatgccaccacattgagctaatttttgtatttttagtagaggtagggtttcactgtgttggccaggctggtctcaaactcctgacctgaagtgatccgcctgcctcaacctcccaaactgctgggattatgggcgtgagccaccacgcccagcctttattttttatttttttaaaatttttaatagagatgaggtcttgatatgttgcgcaggctggtcttaaactccagagctcaagcaatcctcctgccttggcctctcaaactgctgagatcacaggcatgagccaccatgcctgccacacccccccccctttttttttaacagctggaaatgatttatccattaagtacagtgatatggtgcctaggacttatgacattcttaggggc[139 bp omitted]ggtgaaaccctgtctccattaaaaatacaaaaattagctgggcatggtggcacacgcctctagtcccagctactcgggaggctgaggcaggagaattgcttgaaccaggagatggaggttgcagtgagctgagatcgtgccactgcactccagcctgggtaacagagtgagactccctctcaaaaaaaaaaaaaaaaaaaatcagaagctgcagaggataagtaaacaaatgggtcaggcaacgttcctctaaaacttgatttaggaaaacaggtggtatgctggatttgacccctgggccttaagagtgataagggtgtatccggaagctaatagtagttgttttcagggggactctgaggttatgttttctttgcttattccaggtagctttaaaaagaaaagaaagttcacccataatcctgtcccatacagaaatttatataaagctgtggatctcgcgtgtttgcagagcgctctagtctgtggagagtattttgtgcttaaggtgctgggaatagcaatgaggctaggaaaagctgaggctcagactgtcctcacccagcagcaggtgcagcctggctctttctgcgcactcatctattcctccgcttatcctgggaagtaaatgctgtcatcatcacccctgtttcatcttcccctaagcccttggcagctgagggaccgtacactccactcattgatattttttttgtttgtttttgagatgaagttttggtcttgttgcccaggttggagtgcagtggtacgatctcggctcactgcaacctctgcctcctggtttcgagtgattcttctgcctcagcctcccgagtagttgggattacaggcatgtgccaccacacccggctaatttggtatttttagtagagatgggctttctccatgttggtcaggctggtctcgaactcccaacctcaggtgatccatccacctcggcctcccaaagttctgggattacaggcatgagccaccccacccggccataaagggtgttggatgaatgaacatacccccattttatagatgaggaaactgaagtaagacacattgatccacttgcctgtggtcatgtggctggtgagggccagcccctggatcaaggggtggctctggtgctgccctcttgacccctctccttccctggcactgtcctcacaccactctgctggcatccttgcctgtggtgtggcctctgtcagccatctccatcgtgtgactgtggcatcatgactgtagtacttagcacagtgcagcgggctctttgggggcgaatgaggtgacatacgaagcaccatgcctggtttggaggaagaggcaaacctttgtcattgccactgtcactggtcagtggtgtctttgagtcctgagcagatgtaattccttgggtggggactcagcacagagtgaagagcttggggtgaagaccagccttcctgggctccccagctctgccatttcctggctctgcactggaatctcaccctctaccaaacgggagaaactcccacgagaggcagctggcgcagcaggccagagcttgtttttgtcttggagggggacttaggtttgaatcccagctctccccctgcagcctgttttcctgtttcttctccccccaggatggagtgtggtgttgtggtcatagctcactgcagcctccacctcctcctgggatgggtcgccggcactggtcaagatagttcctagtttcaaggccagggtacattgcccagggtcaggccagtgctgtctcaggatatgggagtgcaggttcggggccgcactgactgagtttacaccctgactgctgccttctctctgtgtgcccttggggaggatactgcagccctctgcctcagtttcctcctgtgacctttgggttaagaaccatggtgtgcagttgttgggagcatcctacggctggctcctgtgaagcacttggggcttcctgggcaggacctggtggcccagggagtgtccacggctgggccagcaagcaggcaccaggagggaggcaaaggccctgaccgcctctctctccctgttcctttgcagtttctccacagtcgaactcctctaggcccacctgtgcccgtcacctcaccttgggcacgggagacgggggccctgccccaccccctgccccctcctctgcatcctcctccccttccccttctccctcatcttcctccccttcccctcccccacccccaccgccccctgcacccccagccccacctgccccccgattcgatatctatgaccccttccaccccaccgacgaggcctactctccaccgcctgctccggagcaaaagtacgacccttttgagcccaccggctccaaccccagctcatcagcggggaccccctcacctgaggaggaagaggaggaggaagaggaagaagaagaggaagaggaagacgaggaggaggaggaaggcctgtcccagagcatcagccgcatctcggagaccctggcgggcatctacgatgacaacagcctgagccaggacttcccaggtgacgagagcccccgcccggacgcgcagcccacacagccgactcccgcccctggaacgccgccccaggtggactccacccgggctgatggagccatgcgccggcgggtcttcgtggtggggaccgaggcagaggcttgtcgggaaggcaaggtctcggtggaggtggtgaccgctggtggagccgccctcccgccgcccctgctgccgcccggcgactcggagatcgaggaaggggagatcgtccagccggaggaggagcccaggctggcgctgtccctcttccgccccggcggccgggccgcccggcctacaccggccgcctcggccacccccacggcccagccccttcctcagcctcccgctccgcgggcccccgagggggacgacttcttgtccctgcatgcggagtcggacggcgagggcgccctgcaggtggacctaggggagccggctcccgcgccgcccgccgccgactcgcgctggggcggcctggacctgcgccgcaagatcctgacccaacggcgggagcgctaccgccagcgctcgccctccccggcgcccgcgcccgccccggccgccgctgctggtccgcccacgcgcaagaagtccaggcgggaacgcaagcgcagcggcgaggccaaggaggccgcctcgtcctcgtcgggcacccagccagcgccgcccgccccggcctcgccctgggactccaagaagcaccgctcgcgggaccgcaagcccggctcccacgcctcgtcgtccgcccgccgccgctcccgctcccgctcccgctcccgctccacccgccgccgctcgcgcagcaccgaccgccgccgcgggggcagccgcaggtcgcggtcccgggagaagcggcgacggcggcggcgctccgcctccccgcccccggccacttcctcatcgtcgtcctcgaggcgcgagcggcaccgcgggaaacaccgggacggtggcggcagcaagaagaagaagaagcggtcgcggtcccggggtgagaagcggtctggggatggcagcgagaaggccccggcgcccgccccgccgccctctggctccacctcgtgtggtgaccgcgacagccgccgccggggggccgtgccaccctccatccaggacctcacggaccacgacctcttcgccatcaagcggaccatcacggtgggccggcttgacaagtccgacccccgaggaccctctcctgctccggcctcctcacctaagcgggaggtcctgtacgactccgagggactgagcggcgaggagcggggcggcaagagcagccagaaggatcggcgccgctcgggggccgcctcctcctcctcctcttcccgggagaaggggtctcgtcggaaggcgctggacgggggtgaccgggatcgggacagggacagagatagggacagggacaggtcatccaagaaggcccggccccccaaggagtcggcgccttcctcagggcccccgccaaagccaccagtcagcagcggctcaggctcttcatcctcgtcgtcctcctgttcttcccggaaggtgaagctgcagtccaaggtggcggtgctgatccgcgagggtgtcagcagcaccaccccggccaaggatgccgcgtcagccggcctgggctccattggcgtcaaattcagccgtgaccgcgagagtcgctcccccttcctcaaacctgacgagcgggcccccactgagatggccaaagcagctccgggcagcaccaagcccaaaaagaccaaggtcaaggccaaggcaggggccaagaaaaccaaggggaccaagggaaagaccaagccatccaagaccaggaaaaaggtccgcagtggaggtggcagcgggggcagtggtggccaggtgtcgctgaagaagtccaaggcggatagctgcagccaggcggcaggcaccaagggggcggaggagacttcctggtccggggaggagcgggcagccaaggttcctagcaccccgccccccaaggcagccccaccaccccctgccctcactccggactcgcagaccgtggacagcagctgcaagacacctgaggtctccttcctgcccgaggaggccactgaggaggctggggtccgaggtggggcggaggaggaggaggaggaagaagaagaggaggaggaagaggaagaggaggaggagcagcagcctgctaccaccacggccaccagcactgctgcagccgccccaagcactgcccccagcgcggggtccacagccggtgactcgggggcggaggacgggccagcttcccgtgtctcccagctgcccacgttgcccccgcccatgccctggaatctgccagctggtgtggactgcaccaccagcggcgtcctggcctgtgagtgtcccctgggggagggtggtgctggggcaggtgagacaggatggggactggagggtacagacttagaggcagtggggtgccctggcagggagaggtttatagggacatagactgggagggtgggggtgagtaaaggccagccaggctctaggtgcctgggtgtactgggagagaggggccggtgagagcaggtggtggccagcacagactggagtggtgggctgggttctgggattcccctagacggggagtaggagagagggaccagaaagaatggcttgagcagggcatcgtattccttacggatggcggttgcctctaccagactgcagaggtggggagagaggttgggactggccacagcgggtcaggaggcagaatctcactcctgccactgtctcatcactgcatgaccctggccaaccccgcacccacacacctggagtcccaagaacattcgtggtatgggctgttctctcattggccaaggcccccttttcccagttctgagcgtgaggctttgtggctgttctggggccaagggcaggagatgacagcaggtgtccaggtgaggttcaccagctcctgtcctgtcacctctcccatcttcatgttgtcacctctctgcctcctgcagtgactgcacttctcttcaagatggaagaagccaacctggcgagccgagcgaaggcccaggagctgatccaggccaccaaccaggtgggctcccctgggggagagtccctgccgccccttcttttgtccattgcctcgggttaggagaggaaccgcgggcctggcagctctggggcaaggtatcggcctgaagaggagcctgttgcctcagctgtggggaagtcagcgtgggaacagtggggtgcacgtcccctcttcccctccacctccctttactcatcacccctctgtcctcgtcccacagatcctcagccacagaaagccaccctcaagtctggggatgaccccagctcctgtgcccacctctttgggtctgccccctggcccctccagctacctgcttcctggcagcctccctctggggggctgcggttcgaccccccccacccccaccgggctggctgccacgtctgacaagagagagggcagcagcagctctgagggccgtggggacacagataaggtgagctggcctggggagaggtggggcggtgctgacagttctgtagagaatatggacaggaactgagacgcgggggcccaaggagaaagggagactgaggcagggagacagggccgtagagaccaaagtcatggaaccataaggaactccactttgctggaatgggtgagcaggaaatgcgttaggcgtgtccaaaggaaaatcgcgtctgtgcgtgtgtggggctgtgtgcgtacacaccacatatacacaccctggaagagatgccccgcgctgcagcccaccccttgattatctgttgctcgcgctgtctccgtctctgtgagtgggggagggtggtttccgaatgaaaactcaagaacctgtttgtagatgaagcaggggagaatgggtgccaggcagacagtaatgtaggttcttactcagctgctctggccggctcctactcctgggctctggagctgtttctctcttggtcaggtctagatgtgggtttttgtttttgtttttctttgagatggagtcttgctctgtcacctggtctggagtgcaatggtgccatctcggctcactgcagcctccgcctccagggttcaagtgattctcctacctcagcctcccgagtagctgggatgacaggcacccgccaccacacccagctaatttttgtatttttagtagagacggcatttcaccacgttggccaggctggtcttgactcctgacctcaggtgatctgccagcctcggcctcccaaagtgcagggattacaggtgtgagccaccgtgcccggccttggttggttggtttttgagacagggtctcgctttgtcacccaagctggcatgcagtggcacagtcacagctcactgtagcctcagccttgatctctcgggctcaagggatcctcctacgtcagcatcctgtgtagctaggactacaggcacgcgccaccatgcccagctcatttcttaattttttgtagagttggggtctcactatgttgcccaggctggtctcaaattcctgagctcaagtgattctcccacctcagcctcccaaagtgctgggattataggcatgagccactgcacccagcctagatgtgttttcttacagtctagtagcccatagccagacggtgacgttggccacccttacacagctgtgtaccgtgccagataaagctgtataaaccccattaaacatcctgtgtgagccgcagaggcggggctgcagtttagtcggtcacttgtccgtagcttgtgccttgcgctgcaggactcggacggtgaggaccccctggtctacagtggcccttgctctgccctggtctgtgctctgccctttgccccgctttgcccatccgagatgggtgttggggagcagcgtctctctagagacccacatcctgtggggccaggcaagcctgagaagtccctccagggcagcctgtgtctcttctggccacagagttccctaacagctcagtagctcgtcagacagtgtcactgatgttgctcctggagtcggctagccattgtgccctgcccttcccaggactcagtttacctgcccctactttgatagtcacctggcttgggagggcagcttctccaagggtggtgccaagggactgtcccttgtgcctgcagaaggcctgttcttctctggtcccacgtggctctctggctagaggtttcctgtctgcttttgcaaggattctgcctgaggccagggctgcagctgctgccccgagcctgcggctgcgggatctcctagcttgctggccacaggcgggaagagccttgcctcggaggctctctgccctgtccctgttgcgtcctccccttttcatcccatggccatcccccttggaacaggcacagctcccctggattgagtctttgctctgtacccagcctgtgccatgtcctccatgtgtgtcgctgtagtactgcccataggtgctgtccccgttttacaaatgagccacaaaggtggccaggcacggtggctcatgcctgtaattccaacacttcgcaaggccgaggcgggtgaatcgcttgagcccaggagttcaagatcagcttgggcaacatagtgagacctagtcgccacaaaaagtacaagaattagccaggcgtgggggtggcacatctagtcccagctattcaggaggctgaggtgggaagatcgctttagcccaggagaccaggggtacagtgagcagtgattgtgccactgcactccagcctgcatgacaatgagagaccctgtctcaaaaacaaagaaacaaaaaaggagccacaaaaaggtttggctgagcatcccaggggtcagagacagggagtggcagaccaggcttctgatacaaatgggctcaaggtcagtccccacccccactccccagtgcccctcacccctagccaccccctccatcccctgggtgaccagagcagtactgtaaaaacctaaactgagtcctccccgctcccgcggtgaaaagccctgtgcagttttctacagccccgcctctagagtctgattcaaaaccagctgcaatttcttggccaatgcctgtcttctcatcagactgaactttgtgagggcaggcgacacacatgtcctggtcccggccaggcctggagcagcccagggttcggcctggaggagatgttcagtgacatgcagaggcccaggcctggcctttggtcccgggcacctgcagcagagggcgcatgggacagaccctcagcaggacttccagcctgagagcagctggacggccagagaggttaggctggcagcagaggcgagtggaggtggaggttccgcaggtactcactggcccttgctgtgtcttcccccgctgtcgccaccccaccagtatctgaagaagctgcacacgcaggagcgggcggtggaggaggtgaagctggccatcaagccatactatcagaagaaggacatcaccaaggaggagtacaaggacatcctgaggaaggccgtccacaaggtgggcacccggagagaggggcagacacaggccggggagagaacgagctggagggacagatgtgtgcagacagatggacgcggatgggagacggggaggaggtcagtctgggaggtgaggagggtgacaggattttctcaaggccacctgggcctgttccgctggccctggggcacccatcgtctagggggacagagggactttggcctggttattggggaagctcctcctaccgcagttccaagctgcgcccaacagtcctgggtggatggggccccgggagcctggtggtgactccaactgtccccggccccccagatctgccacagcaaaagtggggaaatcaacccagtgaaggtgagcaacctggtgcgggcctacgtccagcgctaccgctacttccgcaagcacggtcgcaagccaggggaccccccagggcccccacggccgcccaaggagccagggcccccagacaagggtggcccgggcctgcccctgccccctctctgagagccctggccagctcttcgcccctcacctctttgaaactctggacgtatttatggctccacctccccacctccctcccccgtcagtgggatgactgggggagggttgctgcagggaagaggagagccccctgccctgccctgccccgtgtccacctcccttgcccccaagcctgtccccagtgcccctcccttctgtttgtgcccctctccccaatttcattaaagatttcatgaaacattacccctgagccccatggttctaaccctttgttttcggagacaaatttgccagagggttggggagggacccccaggaggctgaggatgggagacagagaccagactgtgacttggggcagctgcctcccctgggcctcagttttcttatctgtgtagtgggtgttgtgatgattgaacaagacacaggtggagcacttagcacagtctctggctgggagcgagctgctcacagggaggcaggggccggaccccacctgatcagcatcttcccagctcggctcctgggtgccatgtgcctgccttggaattgctcccagagcaggatctgtgttccccattgagttggcttctcttttcagcagccccgtgaagctggggtgatctcatcaactgtcctgagagggaaactgaggcacagagcagcaagggccgaagggtgagtcagggctgcgctggcttctgccagtttcatcacccagaactgcggcccaaccaggagaggtgacagtgcccagggtcaccaggcaggcaggctttgcaggctccagggtggccgcagagcccctttaccaagacccctccagccccacgtggaggggagcctgaggcctggaaggagaaggaccacttgcccaaactgttcataggcaaggcagggggcctgggttctggctagtctttgtgtttcctactctgtgacctttgcgcctctcccagcctgtgtcttggtctacaacacggggacagccatcacccaccaggtccctgggcagaagtgaggaggtgtcagctgccccctgcagtgcttggtcttcatgcattgagcacctgagttgtatatagctgcacagatgggtaaactgagaccctgagcgggaataacaaccatattgggtcagagggcacccaacaccagacacgcacaagtgatcatagcaggaaccagtttattggttgaggtggtggggaacaggggggttggaggcacaccatgaggagcgagggctcagctctccccagggccctggaaatccatgccctccaccaagtcctgcaggtaggccttgtactggtcggaggtgagggagagtgggtggctgttggaaatgtgcaggtccacagtattctccagggaggaggcaccccctacccgggccatttctaccaaggccctgaggcacgtgggcacaacctgcaggggaagtggggacaggagtcagggaaaacacccagccactgtccaccaaggtaggagtcagggcttggaggactacaactccctgcagcccctgctgtaacctaggatgaaccataggcctagggctgctgggagttgtagttttacacacacacacacacacacacacacacacacacacacacacaccccctgctgtaactgaaccataggcctagggctgctgggagttgtagttttacacacacacacaaacacacacacacacacacgtcagggctgagcagtctgtgatcttgactcctgggagccacagccatggcctcacaatggcagctaaaacttgagtccaccagcttctacatggtttagagcaggggtccccaacccccctacggcttgttagggaccaggttgcacagcaggatgtgagcagcgggtgggggaatattactgcctgagctctgccttctgtgagatcagcggcagcattagattctcagaggagcacaaactctatcgaactgcgcacgtgagggatcggctgctccttaagagaatctaatgcctgatgatctgcagtggagcagtttcatcccgaaaccacacctccctgtccgtggaaatattatcttccatgagactggtccctggtgccaaatagtttgggggccactggtttagagagttcaaaacaggttctgcaggtgaggccatgggaaggagctcccggggatgaaaaactggttattgcagagatcttggaagttgcagttttttagagggccctctgggagttggagttcctgggagcaacctcttccctctgtaaggccacccctttcagccccagggactcaggtctgcaggcaccttgaccatcacgagcctcttggtccacggctggtcctggggccatgactcccccacacagaaccagagggcatagcgtggtgagcgtccgcttccttccgtgaaggtaatcagatctgggggcccaggagcctagtcagggatgagaagaggaccctctacccacccttccccgtaaacttgaatgataacccccaccacctcccctgacctaaggccctctgctgcctcgaccaggggactgcttgtttggggaaagtcccctccttccctccctccctccctcccatcagggtggggttgttggaaggccacacccccaagcccccaagcctcagcattcataacaggcccagagtagggggcccatgctcccaaggatgctcagtgaatctggagaagctggttggcattcagtcctgtctgaggctgcattgtccaattgcagccattagtcatgtaaggttatttcagtttaaattgtaaccaattaaaacgaatcacgtcctggttgcactcgcctcacctgagtgcttggcccctgtggctagtggctgctgcaccggacagtgcaggtgactgtcatttccatcatggcagaaagtgccactgcacagcgaaaccctaagggatgtagctttcctgctattggtctgttcaccatcattagttacgatgatgatgacagtggcagctaattccctgagcaggctctgtgtactgggcctgtgtctcaccccagcgctggcaggcaggtagagagaggagaccatccttggattccacgggctcagggcaaagtcctttgcctcggttatacagcgggccaagggcagccagcgtctgaattcagtcctaatcatgagttcttttttttttgttgttcgagatggagtcttactctgtcaccaggctagagtgcagtggtgcgatctcagctcactgcaatctccgcctcctgggttcaagcaattctcctgcctcagcctcccgagtagctgggattacaggcacgtgccaccacgcccgactatttttttgtatctttagtagagatggggtttcactatgttgaccaggctggtctcgaactcctgaacttgtcatctgcccacctcagcctcccaaagtgctgggactacaggcgtgagccaccgtgcccggccaatcctgagttgttaaccactgtgcaggctgctttgtactggccaggtcgaagcccctgtctcactcacctacaatgaagggccccaggtcaaacacgcctccttccttgtccttggggacctcgccatcaggcccatgcccgctgttggggagcagctcctcgctcactgcccagtatgtgtggcagtgccccagccgctgggcccagagccactgcccggcccgccagagagccagtcccccacccaggcagctcagcacatgcctcacgtagctcatcactcccctgtctgtcagggacatgccagggtctggcagtgtgactggccatccaggcagcgtcctgtctcccacttcggaccccaccagccgcaggccctccgggcaggagatggtctgctggaagacttggcggccccggtagaaggctgtcacctcgaactcccactctgagcagcggcagcagcggcatgaaggggagaggggttgagaatcaggggctgccgcccagacctcagccctcccagcctgcagctgacactcaccttcccccggcaccaacagccgcttcagtgggttctcagagggccccaggtttgggaagggagtgggattgtccaagctggggctccgcaggggctgagggcagggctcaggggctacagccaggcttgggggtcccggatctgggagtggggccaacaccatgttacccagtaactcatccagaatgtcttcctggagggaaacaaaaaaagagaatcaggcatttccatatccttttctggagacttcatatggaccaggtctgttctcagcaacgcagggaggtcaggcttgagctctgccttcaaggggcttccagcctggggacagagccagccatggcatcaacagccaaacaaacactaatgaacgccaggtgctaccattccaacccaaggatctggctctatgcaggtaagacctgggcaaagcaggctgggtagaatttcagaggggatgctcccccagcttgggcctcagcaggatcaaggtgagggagtttttcagttcccaagaggctgacagccccctgcgaatcgaaatccatgaaatcccgggaaggtgtgctcgggccttgaatgctgggtgaagacttggaattttctcctgaggagaccggggcagggacagacagggtcagcactggctcaggtgaggggcaggctggaggcaggggagtggggggatcgtctagagggagaggacaaggcccatggagacaggtcggagactgaggggcatgaaagttgggcacattctcacctgggtatcagaagtactgcctccaccattggtgtccggagaggtgtctggctgggaaaagtccccaactcctgttgagaaaagtggtgaggggagtaggagtgccaggaacccttggggccccagcctcccacacgaaccccaagctggcagacctgagttcacaaactcgtagattttatgtgggtcgtgagggtccttgctccggtcctctgctaaacgcaacccttctttgcggttgagggcagagcggaaattcctcttccaggttggcaggtctggcttatccctcccgggaacatatgcaccagtggcctcggcccaggcctggggcaacagtggtgtcaggatggtgggggaggacgacttagatcctgctcctggggccctaaccctgtctcccgagtcctaacaccaccctctttccctggcaagttctaactctgcaaggtccatccccaaatccccccgtcccacctacctccatcccccacctctagttttcaaaaggctttttttctttttgagatggagtttcactcctgtcacccaggctggaatgcaatggtgcaatctcagctcactgcaacttccgcctccccggttcaagcgattctcctgtctcagcctcctgagtagctgggattacaggtgggcaccactacacctggctaatttttgtatttttagtagagatggggtttca[132 bp omitted]tttgttttgtttcgcttttgtttttaaagagatggagcctatgttgcccaagctggcctcaaactcctgggctcaagcgatcctcccgccttggccttgcaaagtgctaggattacaggtgtgaaccaccgcccccggcccaaaaaccttttctttctaagccaggcttccaagtccaacttggtgtctaatcccgtgcaccacctgccccgcgacaccctctgtgataaccccgcccctcacactgtttaccacctctggcatatactaattcggtagttaggaacctcagatttggggctccaggcctcacctctgatgtttcaagaaccatcccccagtatctatcctacaaccaagagccccggcctctagaaagccccaaacccccaggatgcatttcctttgcgtactaaccggctttcccggttttattcccgtaaccctgcagctccaaccctgcttgcgccccaccatcagtcagcggatccggctagccccgcccctcccgttctagccccacccaccagcgttggcacgagcccgcccctcgcgcgccacctccgccttctcagccgggcccactaggagtcctttccgcccagcgcgcagctccgggtttccagcgtcccaggtcgtcgcacgcacctggaagattccgaaatcctcctgctgtgcatcctgccgtaggccgtgcttccaagggatgcggaagcgcgtgcggctcttgttcacccaggccacgccctccagttgccccaggtccagctgcgacaccagccagggcaggatccgtggctttggggttcccatggtccggcctgcgcgtatagggcatttcctgggcgcgaccggcctcccccggacccacctggcctggagtttccgcacccagacctccttctcacgggccacggcacaggtccttcacccatattttcgggggtacaaacaggaaacctcctcttcccatcctcccatcctcccgagaggctctctaatcagctagggttccttcccatatccatggcacatccttccccagcgtcttcagtgcagaccctccactccctcaattccgccagtatagacctcctccctcccccacatcatcgaaagtaagtatccccactttcagggtagcatcctctttccctagttatttcagtgcagaatcgattcacgtgtaagcctctacctcctgcacttaccccaatgtagacccccttccacagtccccctacagaagatctcccaaaacatttccaacacagaacttccattcaattcccctccgactgcccgcctccctcctccaggacagagcacgccccaggtttcgagactgaactacccccatctacggagtccacccctccctctctagaaccccctcagtgtagacgcctcctcttttcctctttcctccctactttttctagtttttctgcagccgacctccagcgtcggccactgtagctccttccttgctccactttccccagagtacacagcctgcctttccactctccgtgcagacccatcctctttcccgctcctcgctctcggacgccaccaacgctctcccgggctcttccgcgttacctacgatggaaggtcggggcgtgcgggcagctggaacccacccctgtcttggagctccgggtagctctcaaactcgaggctgcgcaccccctttcccgtcagctgagctctagagcgctggggctttctttttgatcgacttcttgaaataaaaccaactttatcattctttgggtaacagacccaaaagccgatgggacggcccgctgggctgttcccgcccctatgcccttttttgggtttccggccagaggcatgctgggagcgtcacatgcaaattgagcgtgcacccagcgttccgccctttctacgctgggccggttatcgacccggcccagtgcgcaggcgcgggaaagttgaactaataaagtttgtacgagttcagtggaggagaccgcaagttgagtggaggaggcggcggtggggccccggaccaggtcagcggggtgttgacgaggggtggggtgaggagggaagaggagggggccgggatccagtggtgggcaccccagtcccgcttctctgatatccaagggtccagggtcctctagattccagcaggggtcggagatttggaactacacctcacagcaggctgcgcggcgaagaagcgcggacctaggggaagatttgccctgaaacctcttgggattggtagttcccgatgctttaagggtttcaggagtttggcatatgcctcttatagaatccaggagttggggcgctaagcctcttcttcctgggagacctaagggtctggggctccagttcctttttctctaagactcagaagtccaggaccccagctccctcctcctttagacccacgaatctgggcacccagccccaccacctttccttggatcgaagagtctttttcctgatcgctttttcgtctgaggactcaagagtctaggcccccagacccacactctccaaaggacccaggagtccaggccctcagcaccttccttgggactcacaagtcctggtccccaagcctccacttcttgctaaacccttggagtccagtccctaaccctctctctcacaggtgcctccatggcaggctctgaagagctggggctccgggaagacacgctgagggtcctagctgccttccttaggcgtggtgaggctgccgggtctcctgttccaactccacctaggtaagaggagtggcccttctcccccaggggccagcatttgaggctccctcctaactcttgctcctggtctcagtctgtctcctctctttatatctggctctattctctgtctttggggttttggagagaggtcctcagcgggggagggagggagttggggaaagagactgcttgcaggggatctctggtggggtcagtctctgaagtcctcctctccagaagccctgcccaagaagagccaacagacttcctgagccgccttcgaagatgtcttccctgctccctggggcgaggagcagccccctctgagtcccctcggccttgctctctgcccatccgcccctgctatggtttagagcctggtaagagatttccatgatcatctatgaagccggcagaacacgggataaggtgctagtttaagatcactcagctagggggtggctgtgtggagtctctagcaccagccttcaggacagaaccgtcctgtcctctcccctccccagttagatttctgtcaattctgtgggttggctttcagagagcatttggtcaatctggttgttgtctctttccttccataactacttccctgcccctaggacttttgtagccaggaatacccctgatagaggggcagaagggctggttttcaatcacatctccctggctgttttagttgcgtgactctggggaaaatgctttctcttccctgctcccctgtttttccaatagcagagtaggaattggggaggaggtcactggacttgatcaaggtgacccacaagtttcctcataggtgtgaacctggacagactagtaatggctgctgggagtgctagcttgaaaaggggttcacagcttgggagaggaagtgctgtgatcaattggtgatgtctgtagtgagtgagggaaggggatactaacagtaatgtcttgtgtttgccttccttggatgagatcatcttcaaggtctagttgagctctgacagtcttttggagacagattgttgctctgtcacccaggctggagtgcaggggtgcaatctcgactcactgcaatccccacctcctgggttcaagcgattctcgtgcctcagcctcccgagtgactgggattacaggtgcacgccagcatactagctgatttttatacttttagtagacacggggtttcgccacgttggccaggctggcctcaaactcctggcctcaagtgaccctcccacgtcggcctcccaaaatgttgagattgcagacgtgagccaccgcaccctgtcagctctgacattcttttttttttttttttttttgagacggagtttcgcccttgttgcccaggctggagtgcaatggcccgatctcggctcaccacaacctctacctcccgggttcaagtaattctcctgcctcagcctcccaagtagctgggattataggcatgcgccaccatgcccggctaattttttttgtatttttagtagagatggggtttctccatgttggtcaggctgctctcgaactcccaacctcaggtgatctgcctgcctcagcctcccaaagtgatgggattacaggcgtgagccactgcgcctggccccagctctgacattctaagtccagtctgaggatctcataaagtgaaaagtacaagggttttggcatttttaaccaagttttctcactgggcctcagtttaccccattataaaatgggaatcatggccaggcttggttgctcacgcctgtaatcctagcactttgggaggctgaggtgggtggattgcctgaggtcagcctgggcaacacggtgaaaccccatttctactaaaatacaaaaaattagccaggtatggcggcgtgcgcctgtagtcccagctactcatgaggctgaggcaggagaattgcgagactccgtttcccaaaatcaatacataaataaataataaataaaatgggaatcattgccacctgccaaggtagttgggggaaggagagaatccgtaagtttccaatgtcctggaaacctgtcattaactcttttcaccccaggcccagctactccagacttctatgctttggtggcccagcggctggaacagctggtccaagagcagctgaaatctccgcccagcccaggtgaggcacagaggagccccagagaaggatggcggtgggaggatagtcagggttctgcccccagccaaattctcttctgcctccagaattacagggtcccccatcgacagagaaggaagccatactgcggaggctggtggccctgctggaggaggaggcagaagtcattaaccagaaggtgatgggcatctgtcccactccttggcaaggacaggagttgcggaatggtggggcactgggatcagaagctggatctgtattttctttggatggtca[141 bp omitted]gtgaaaccccatctctactaaaaatacaaaaatcggacaggtgtggtggtgcgcttctgtaatcccagctactcagaaggctgaggcaggagaatcgcttgagcccaggaggtggaggttgcagtgagccaagattgcgccactgcactccagcctgggtgacagagtgagactctgtctttaaaaaaaaaaaaaaaaaagaatagttgaatgacaggggtatggttagggtagtactgtaccgtaaattagttgttttaattgattgtttagaggggcatggcctaaatgcagagggtgtggccatcagaaacattatccacaagagactggccaagctggggaagtaagtgaatgaatgtgggggtggggggagtggctaaaatcttactgagcatagaagggacctggcttagaatgtaggggaaaatgtactaccagaggaggtgtggcttgtggctgtgtcctggaatctgattggcttcggagcttggacaaggtacatcgtcctttaatattaattgaatggtagagggcaagattgttgtagacactaggttggcccctgggaaaggtcaccaggggcatggctagattaactcagttacagtagagattggccctgattggctgttgaggcaagggcctggcatggcttagggactcacgttccaggccactatcccgggggtagtttggcagagaccctggagtctggcttgattggctaatatggatgaggggtggcctagaaccttagcatctagaacgatcctgaaccgggaagccacgcctcccggccctctattggctggccccgggggcgctgctgacgcggaccctgcctcttccaccctacagctggcctcggaccccgccctgcgcagcaagctggtccgcctgtcctccgactctttcgcccgcctggtggagctgttctgtagccgggatgacagctctcgcccaagccgagcatgccccgggcccccgcctccttccccggagcccctggcccgcctggccctagccatggagctgagccggcgcgtggccgggctggggggcaccctggccggactcagcgtggagcacgtgcacagcttcacgccctggatccaggcccacgggggctgggtgagccgctgaagcctctctctccgggcctcactttacctaactgtcatgtgatagaggaggggcggggacttcttaggttcctctcagacctcaggtattctcccagctccactgcgttcgttctgttgagcccttgctgtatgccaggactgcagcgatgagtgcagacactatgcctggcgtcaacgactgggtacgctaatactgtgagcgtgaaaccagtgactgaggttactcagggagaggccggacggggtagctcatgcctgtaatcccagcacttttggaggccaaggcaggagaattatttgaggccaggagttcaagaccagcctggacaacatagtaagaccccat[132 bp omitted]aaaccctgtgtctactaaaaaaaatacataaattagccgggcgcggtggcaggtgcctgtaatcccagctaccgaggagactgaggcatgagaatcgcttgaacctgggaggcagagattgcagtgagctgagatcatgccactgcactccagcctgggcgacagagtgagactgtgtctcaacaaaataatataataaaaacctggtgcggtggctcacacctgtaatcccagcactttgggagactgaggtgggtggatcacttgaggtcaggagtttgagaccagcctgaccatggtgacattcagtctctactaaaaatacaaaattagcccggcatgcctgtaatcccagctagggaggctgaggcaagagaattgcttgaacctgggaggcagaggttgtagtgagccgagattgcaccactgcactccagcctgggcaacaagagcggggctctgtctcaaaaaataaataaataaaaatttttaaaattaataataattagcaaagcatggtagctcacacgtttactcccagctactcaggaggcagaggagccgggaggatcacttgagcccaggagttcaaggctgtggtgagctatgattgcgccactgtactccagtgtgggtgacagagtgggaccctgtctcaaaaaataaaatagtgagagtagtagtgctacctcaaagggtcgctctgagggttaaaatggggtcaatgtggtaagccctctgtgcactgcctggcatgcaggcattttgttggtgaggttatatggctacctgctgcctttccaacagtgcctgccaggatgccctcccggggaaccccctgcctccgtcctgctccttctggtgggctctggtttcacccccaacgaggccttcccaggtccccattgacaatcacagccacctgcacaccctcccaccgccctccttcccccttcctgctttacttttccttccatagcactttgggccttccaacagatggtggaattgacttgttttacttgtcttctggtttatttttctttgttggtgtctcccacctctaacacatcagcttcaggagacccagaagtcttcccctctccttttcttactttatctccagtgccggtttcagagttggattgggctccagcgtgctggccctgtggcttggcgactgtcgcagtctccctgagcggcactctccccactggtccagtgagcaccgtctcatttacctgccttggggggtcgctgtgggtattcactgagagagggacacaagccaggctctggatggaaccggtttccctggcaggagctggtcaagtgtgtttgaggagcagggaggaggaggccagtagggctacagtagggtgagcgggcgacagatgagaggaggagaggcgccgggccagccaggaccctgtggtcacggtgagtgacaactcggactttgactctgggtaagccaaggtctctgagcagcggagggacaggcgctgatttaggcgctaatgggcgccctctggcggctgcctggggacagactgctgggggcgagggcagaagtaggggcacagggaggaggtgagtggatctcacccaagtcgggggcggtggagaatgctggatttaacttagcggtgaagctgacagatttggctaatgggccagatgtggggacagactaaaggatgctggcccgagcagctgcagggcgacatcttaagttccccgagatggggaaggtgtggggatgggggcgatgggggtggggagcaggactggaggtggtccggtctacagtaagatcagaactcatagcacatgttgaggggaatggatataagtgttgggctcagcaaagaagctcgtttattttattttattttaatttttcagatggagtctcactctattgcccagactggagtgcagtggcacgaccttggctcactgcaacctccacctcctgggttcaagcgattccctgcctcagcctcctgagtagctggggttacaggcgcacaccaccatgtccggctaattttgtagttttagcagagacggggttttgccctgttggccaggctggtctcgaactcttggcctcaagtgatccacccacctcggcctcccaaagtgctggaattacaggctgagctaccacgcctggacaatttcttaaaaaatttttttaaagtaggattgatagcagatgagttttctcggtgggccaggtcctctgctagggatttcaatggaatgatcccatttaaacccactacaacctcatggggctcttattgtcctcgtcttgtgggggcagagaggaaaagtccccagcatgcagagtgttggaatctggatttgtacacaaagccacgactctgaattgttcaaatcccaagactctcttccccatctctgactctgtcccccaactcttcactctctctggatctctgtctaatcccactccagtgtcctgaccctcctcgagctcaacctttcctcctcctgctaggaccctgccccctcatccctgtgcccttctgtctgggtctctgtccccttgtctgggtgtctgtcaccctccgctctctggttcctcgccttcccgtctctaatctcacagggctgatgtggacgctgctgtatggggggaacacctgccctgctcacagggctctgccacttttcccttccaggagggcatcctggctgtttcacccgtggacttgaacttgccattggactgagctctttctcagaagctgctacaagatgacacctcatgtccctgccctcttcgtgtgcttttccaagtcttcctattccactcagggctgtggggtggtggttgccctacctgtttttgccaaaaataaattgtttaaaacttttcttattaaaaacgttacaaagtattcaattgtctgttcttacacttgggaactaaagttttaaggagaggagatttggttcagagatttctgtggcttacgcaaattgaggaaagaaccagttcattcattctagaaatatttatttgcagcacctacaagagcctgtctcctggacatgtaacatatttgagagaatacctgtaaatattccagcaacttgcatttttttttcctattgcacgatctggttattctagctaatgctgtatgatggtcatggagtctttccagtgaattccacagaaaggtacagtctaacttcacctgtgtctaggacaccaccctcttcttgtttttctcctcccattgctcctttcaagtctctcttgctggtttctcatctacctacagaccagtggtttgtctcacacacaccccccactctccctttttttttggagatagggtcttgctctgttgcctatacttgcactgttatatagatacagtggcactatcatggctcactgcagcctcaacctcctgggctcaagtgatcctcccacttcagcctctctagtagctggaactaaaggcatgcgacacgacgcctagctaatttttaaaaaagaatttttatgggaggccaaggcaggtggatcacttgaggtcaggagttcaagaccagccaggccaacatggtgaaaccccatctctactaaaaatacaaaaattagccgggcatggtggtgggtgcctgtaatcccagctacttgggtggctgaggcacgagactcgcttgaacccgggaggcaagaggttgcagtgagttgagatcacgccactgcactccagcctgggcaacagagcgagactccgtctcaaaaaaaaaaaaattgtagaaatggggtctcccttatgttgcccaggctggtctccacctcctgggctcaagtgatcctcctaccttggcatcccaaagtcctgggatcacaggcatgagtcactgtgcctgggcggtttgtctcctttatagggccatatcccccttcacagagtaatgtttgtaaattaataagtgaaatgtacaggattacaaaccgaaccaattacagttgatcctcagtatttgtagattatttgcaaatttgcatccttgctacaatgtattcataccccaaaaattaaggcagtgcttttgtggtgttttggagggcaatgcttatgcacagagctgcaacaagctaaagacctgatgtgcatatttgcagctgggctcctcttgcttcagctcaaacactggaaacaaatgtccttttcttggtttgtttagtgccatgcttttcaatttttttttttttttttaaagttagagtctcggtctgtcgctcgagctggagtgcaatggcttcatcctggctcactgcaacctccacctcctgagctcaagcgattctcctgcctcagcctcccaagtagctgggattacaggcgtgtgccaccagtcctggctaatttttttatttttatttttatttattttattattttttgagatggagtctcgctgtgtcgcctaggctggagtgcagtggcaccatctcagctcactgcaacctctgcctcccgggttcacgtgattctcctgcctcagcctctggagcagctgggactacaggcgcccaccaccacacccggctaatttttgtttttttagtagagacgggggtttcaccatattggctaggctggtctcgaactcctgagcttgtgatccgcccacctcagccttccaaaatgctgggattacaggcgtgagtcaccgcgcccggccaaattttttttttttttttttttgagacaagagtctcgctctgtcacccaggctggagtgcagtggcgcgatctcagctcactgcaagctccgcctcccgggttcacgccatcctcctgcctaagcctccacgcccggctaattttttgtatttttagtagagacgggggtttcaccatgttagccaggatggtctcgacctcctgaccttgtgatccgcccgcctcggtctcccaaaatgctgggattacaggcgtgagccaccgcgcccggccgcctggcgtaatttttgtatttttaatagaaatgggggtttcaccatgttgcccagactggtctcgaactcctgatgtcaagtgatccgcctgcctccgcctcctaaagtgctggaattacacccgtgagccatcgcgcccgaaccctattgtaaattttaagtctcaggcgtttgccagcggcacgccagagagtatagcctgcgcggaggcccagaaaccaaagagcgagctcattccgggattggagagaagtgtgagcagagggaagtagagggatcggggagaggaggggcaggacccacgcattcggccctttgcattcagcttcattcaactaggaactttttctgcaaatcaaggaaagcttcccggaggaagtggtgcctaagctgtgctctgattcacgtttagaagctgaccagacaaagagaggtgggcgttcctggcagggggagggacttggcaaaaaccaagtggcttgagaggggttgatggttttaaaaaacttggaatgattatgtcaagggctagggatttaatgtgttgacgacggactcctattcctcacttgcttcgggaccccagctatgcccttcctctctctgggcctctcaccgattccgtttttcccccaggtaatgagcacaagctccctttttcctccagactccccccgggttgggaggatccaccgagtggacgaggagtgataattcctttgagccaatcgttggtgcctgaagccccgccttcttccctacccgtgggccaattgccgtgttctccttgaggccggccgcttggcgagggtgggccaaaggctgcgtgacgtcgcttccggataaaccaatggcagcgattaggaggcgggtcgttttggtgatggacaggtgtttcaagacgcccctttagcgcggggctccccgggaagctttgaggcggtgctgggtgtaaaggggagggcattcctggtggattttgcccaatcaccagtcgcgcttcttgcaatagacgggcagttttccccatcccgggtcgacttgagggggcgggattctggacgccagagttggcaaacccctgacctatgatggacgtattctctagccaattactagacggtattctcagacgggccgcctccattgccaatgaaatcttccagcggggtcgcggtaggcgggccgtggaccctctggtataaggcggtcccgggggagtgaggagaaagggggggtcttggcggccggaggaggagtaggtgcgggtgaagatggcggcagccgaggccgcgaactgcatcatggaggtgagcgcttggagcgccgccgtgggcgggaggcggctttgggtcggtgtttcacgcctctgtggtggggaaagggctctaagttggcgatatggggttggaggtcccccgccgcacacgggggcgccgcacgttccacatccggggatatcgtttgaggtgacggctccctagcttccaagggccttcggcatccggcctagcggagggtcttatcccccctcccacgtggaggagggctgggggcgcttccggccaggcccccacgtggccgctgcgcggtgggtggggagggggtgtgccgagtccagtggcccggcgggctccacgtgcgggacaaaggccccgcccccggccggggaggggcgcccaggggggcggggagggggtccgaccctcctgacgcccccagccctcctccccggggacctgggcacacgccgtggggtgtgatcgacctggggccctccacgatgtggggagtctcttgggaggagcagtgcttctcagccctttaccaacctccttccgagctccgggggcatctgttgggatatcggacccggttttgtgcgttctgggttagggactggaggaaaaccaagaatggggtcccccgccgaccccgtttcccctcccagaattctccccctcgcccagggctttaggagttgggggatggggcatgcccctgtgacctccctctgggtggtggtggggcatctagatagagattttcccattaataggcgccgtgcacccccttgtggccatttctgggtgtgtgggagggacatctttttcatggggcgtgtcctgaagcccacctcccctcggatttcttcctggcgggcggagggaggagggtatgtccgctgggaaggagttgtgggaaatatgtaggctgagagctttaccctactggagccgtttatctcccccgggtctttgtgagggtgcgagatgacctccttcttcctgaagccctgtgcagggtcctgagccctggggtcctgagagtgggtgcctgaaatggtttcgagtgaggtttggttctcgtgcagccatgtgggggaggtttcagtcttgcgtttcaagccctctggggctggggttgtctggcggtagttttcagtggtattgagaaataggcccgagtgggaaaccccctcagcacctttcttcttataggcatccccgctagcttgggagagctggagggagggtgcttggagcctagtaggtcatggcctgtgacgtggcccttcttggagacttggatagtggtcacatctggaagagatgtaatctgatggggcctctgtccttccaccccttacctatggcattggctggaggggcaggtcagctctcagctgtcaggatgcagctcccaggggtcactgtaatgacttcccaccctcttggctgtctcctgcacctggggctctatggatggaggaaataactttcccagaggtggcctcaggcttggccgcacctggaagtcttcagggcctgggatgggtgtctgaatgggggcgatggcctgactccccaagccactttttttttttttttttttgagacggagtcttactctgtcacccaggctggagtgcaatggcttgatctcggctcattgcaacctccgcctcccgggttcaagcgattctcctgcttcagcctcctgagtagctgggattacaggcacccgccaccaggcccagctaatttttgtatttttagtagagatagggtttcaccatgttggtcaggctggtctcaaactcctgacctcaggtgacccacctgcctcggcctcccaaagtgccgggattgcaggtgtgagccaccgtgcccccaagccactttctggagtcctctcattcttagagggtccaggagctgcccatcttccctgggaccctaccttcgtgggcagagggtcataagggagggggttggttccagctggttttgtttggggctcctgagtccaaggcaggagctggggtctggggtactagctctggggaagtacccgtgtgccacacctctattctggaatcctctcagacatgagactggtttgcagaggtggcagatgccctgtgggcatatcctgccagccccgctcccttctgctattcatggcaccctaggataggggtgtgtgtgtcaggaagtgtcacctaatctggaggagattaggtgatgagagggagcgacagctggcggtggtgggtgccaattcccctggcctggatgggggaggtgtgtggtcagctgcctggccagagaggggcagcgtgggggtgggccaccatctctccagccacagctgggataggagacccccctttcttctcccctcacttttcccaccctttcttaaacaccccacctcattacttgcccccttcgccaccactccccaccaagaaggagaattgctggaaacccaccccccggccagagcccaggttccgccacccagccctcccacagccactcccagtagctaatcctttttccctgttactctctcctagaattttgtagccaccttggctaatgggatgagcctccagccgcctcttgaagaagtaaatatccttttgtgagacccctccccaccctgacctccacatcaatatatcttgccacacatctggccctttcttgaggtctaaccatacccctcttgcttcaaaccagtttaccccaggcccccagacacttagtagcaacccctccaggttcacagcccccgctggcctcccccagtatcgccgctacttccttaactccacctccaacccccctttgcccttccctgtgtctgcccccattttccttcccctcccctccccagctgtgggctgagctagagacggggtcagagagactggagagatggtaggcgtggctgaggtatcggggtgctcccctggatggtgctctgggggggtcctggaagtggaaaatggggttgttaggttttggggttcctgggggggcaagatggcaggcgggggctgtagggttgtcatggtatgattttgggggttctatactactcttcagggaaaagtagggcgctggaggtttaagaggctgtggggagcccccagatctgacccatgatcccatcggccccctcccaggtgtcctgtggccaggcggaaagcagtgagaagcccaacgctgaggacatgacatccaaagattactactttgactcctacgcacactttggcatccacgaggtcagtggggacagtccccaaggccccaatcttaggggggcttaaatgttggggaaggggtggaacctgttttcccacgcatgcgcactgcttcccctggccgcaggccgcccccctgcccctctgctgcgcacttcctagggtcgcctcgccaagccgttgccttggagaccgaggttagcctgaatctctgcaggggcctcgcgccgaaggctggggtgggagagcgcatgcgtgcctggggccttagccagaggtcgggcagggcccactggtctctgccgccctctagtgaccggcggtgggactgcgccccggctgctcccgccctaacagcttctgcacacttcagatctgactgaagacactgaaatcccagaacgaagctggggtggcattctaaggaattttcttttccccctgaggcctttttcataaaattgtggcaaaatatgcataaaattgccattttttatttttagagacggtctcgctctgtcgcccaggctagagtgcattggtgcaatcatggctcactgcagcctcgacctccccggctcaggtgatccccccacttccactttcggagtagctgggaccacaggcgcgcgccaccacgcccagctgatgttcttatttttctgtagagataatcttgccttgttgcccaggctggtctcaaactcttgggatcaagtgatcctccggctttggcctcctgaggtgctgggattacaggcgtgagccaccgctcccagcctgaggacttttaaaagccagggttcactggttcttaggtagcagtggtgaagtccggccaagattggagtttagaccatctaatctgattttttaaaaagggaaactggctgggcgcagtggttcacgcctgtaatcccagcactttagggggctgaggtgggtggatcacctgaggtcaggagttgaagaccaacctgggcaatatggtgaaaccccatctgtatgaaaaatacaaaaattagccgggcatggtggtgtgcacctataatctcagctacttgggaggctgaggcaggagaatcacttgaacccaggaggcggaggttgcagtgagctgagattgcaccattgcactccagcctgggcaacagagtgagattccatctcaaaaaataaaataaaataaaaataaataaatgaataaatataaaagggaaactgaggtgcatggaagaaagcgagagggccgagctctggccctccgagctctcaggacacgctgttctccagctggggatatggggcccctcacggcgtctctgtgccattcttgccctaggagatgctgaaggacgaggtgcgcaccctcacttaccgcaactccatgtttcataaccggcacctcttcaaggacaaggtggtgctggacgtcggctcgggcaccggcatcctctgcatgtttgctgccaaggccggggcccgcaaggtcatcggggtgagtctccagggtggccaggcggggccgggcctgagggatggaggggagcccatcagggctcagggattggatggaggtgatgggggcaggggatgggtctcaccctcccttcttcctgggccctcagatcgagtgttccagtatctctgattatgcggtgaagatcgtcaaagccaacaagttagaccacggtgagcccagaaagaggatgggtttgtgggagtggagggggtgatgccctgcttccccagggccctctgaagagcagtggggtctacagatgaccacagattcagcagctcccaacccatggtcttttgggctgccggccgcctgagaatctgagtgtcaaaatcacaggcttagcaccgcagtcttaaaattagggcaagaagcactctctagtttcttgaatgagtaatagagtcacgtggttggccacggaaggcccacagtgagaagccttccctgtttcccagctgccctcctctgagtttaaccaacactaacttccagagaagtctggacctacaaacacatacatacgtaaatgcatttacattctcgtgcataattttcacgccagtagcatttcataccagcctcttgcccttggcttcttacacctgcttgtcatgtcgtttaacactttccaggatgttgcggcatccgctcttttgcatgaccaccatcataggtacatccccagcatttttttttttttttttttttttttgagatggagtctcactcttttgccaggctggagggcagtggcacgatctcagctcactgcaagctccgcctcctgggttcaagtgattctcctgcctcagcctcccaattagctgggattacaggcgccagccacc[137 bp omitted]tttttttttttgtatttttttagttgagacatggtttcaccatgttggccaggctggtcttgaactcctgacctcaggtgatccatccactttggcctcccaaagtgctgagattacaggcgtgagccaccgtgccatcctgaagtgatttttaaaaagagattattataatgaacgcacgagtccatttgaagcaaattcccactgtgatgtaattttcccggtaaatgcgtctgcttgtgtcttatctaatagataaaggctgttttgagaatgtgatcatgctgttacttattatatcaaaaccacccagttaaaaacaaaatcgcggccgggcacagtggctcacgcctgtaatcccaacattttgggaggccgaggcgggcggatcgtgaggtcaggagatcaagaccatcctggccaacacggtgacaccctgtctctactaaaaatacaaaaaattagccggacttggtggctggcacctgtagtcccagctactcgggaggctgaagcaggagaatggcgtgaacccgggaggcggaggttgcagtgagctgagatcacgccactgcactccagcctgggtgacagagcaagactccgtctcaaaaaaaaaaaaaaaaaaaaagtaacatcacctgatacccagtccacataaaatttctgctcctgcctcaaaaatgtccagaacgatgtatgaattttaaaactgttagaagggttcatggcttctgctcacgcagttctctgaactgaagtggggtccccaggctctagcccccgggggaggtgaggtgaggggcaggcctcccgggggctgacgtggccacccttgtccgcccgcagtggtgaccatcatcaaggggaaggtggaggaggtggagctcccagtggagaaggtggacatcatcatcagcgagtggatgggctactgcctcttctacgagtccatgctcaacaccgtgctctatgcccgggacaagtggctggtgaggccccagcgggacgggtgcagctcgcgtgggctggggtccaggtagaagacgaaaaccacgctcaatttttcccacagacgggacttactgtgggggcttagctgcaaggtgttagaaagccacagcccaagccaggtgtgacagaccctggagggagatggtgcgatgtgggggaggtcgtaggaacaggaaatccgtagcggcgcaatagcccaggtccttaggccccagcaggcctccccgggagaggtgaggtgacggagaggtggatgaagcatacggaggggcagccagggcaggtgtgcccttgctgcgtgtggaacagcagggaggcccgtgtggaaggagggtctagaacggcagcaggaggaggagtggaggtgaggggtgacagggcgtgtgcagattttgtggaggcttatgggaccccgtgcttttcctctcagagcagctagggagggtctgaggatccccagaacctccaagggccgggagctgactggggtgcccctgggtgccctctggcggccgtgtgggaaatagaccagggggcgaggggtgagtgccgctgcgacatgagggtggcccagaccagggcaggaggccacatcttggaggcaagactcagggtagtgttgccaggccccacccttcatgcctcgccctgcccctctgtaggcgcccgatggcctcatcttcccagaccgggccacgctgtatgtgacggccatcgaggaccggcagtacaaagactacaagatccactgtgagcgcggcccgggagctggcgggcggggcctcgggtgggctgctgcgggctcaccccctccctgcctgcctccccagggtgggagaacgtgtatggcttcgacatgtcttgcatcaaagatgtggccattaaggagcccctagtggatgtcgtggaccccaaacagctggtcaccaacgcctgcctcataaaggtgagggggtgggcatggccaggtgccccctgggttgaaaccaaagagaggccatcacctggccctggcatgggactttggggcccagaatgttggcctgaggtctcagagcctgatctgccagccagaggtggtgctagaggcccaggaaagacacttcgtcctttaaatatctttgtgagcgctgctgtgtgagaaccatgcttggcacttggcttctggcggaggaaacacccaaagctggcagctaaagcccacagcccatgcacggaaaggcaggaccccagggcgatgagcggatgcacatgcacgcgggccactgcagaagagcacggggccaggctgggctccgagatgtgcctgaggtcccagctactcgggaggatcacttgggcctgggagttcaaggctgcagtgagctgtgatcacatcactgcactccagctttggtgacaatgttttgttttgttttttccttttgtttttttttacttctgagaccctgtttaaaaaaaaaaaatacggcgatgagtatttgttgagctgggatgtgtgagccgggtgaagctgggtggctgaccgggggatcctgtcggggaggagtaagttgttgagtgggggaggagaggagactacaggggcagggaccccactcgggccaccctcctgagagccaggggaactggcgcagggtttaggttggcatttgtgttgccgtttgaagccatcatgttgttggacttgtcaaggggttggggagacagtggagtggggcgcctgcattctaggaggtctggacagagttagggtggcactgccaggtttgggtgttggagaggagggagcaaggaatctgggctcgaacccacatggtttattgggagccggataggcaggatgcagagtgaaggaggagccgaggctgggtgccagtgagggagggctagcaggaaggggacagcgaggtcacaggccctctgggagcttaagggagggaggaggggatgaagcgaggtggggacgcatcccggagctcgccctctcatgtcctgcaggaggtggacatctataccgtcaaggtggaagacctgaccttcacctccccgttctgcctgcaagtgaagcggaatgactacgtgcacgccctggtggcctacttcaacatcgagttcacacgctgccacaagaggaccggcttctccaccagtgaggcggggcccacagggctgggggccgttcccgagccagggcggaggcgcacccacgtagtggagggggtgacagaaacgggcagaaggaaccatggggacacgcgtgttccagtgtgagctctgccatgtagcagtcacgtggccttgggcaagtgacctgagtgtgcagtgcctcagtttcctcatccacaaaaggctgacacggtccctgtctccaaagctcaatgacagggaggtgactcgcggatagcagtcccatcagctgtcatgggggtgggcattccgacagagggaacgcaagggtggggttggggggggcagcaggccgaggccggctgacccgcccgcgcccccaggccccgagtccccgtacacgcactggaagcagacggtgttctacatggaggactacctgaccgtgaagacgggcgaggagatcttcggcaccatcggcatgcggcccaacgccaagaacaacgtgaggctccgggcagctgggtgggagggtggcagctagggcggggagtgtagattggggggggagtggtgggggaggaatggtggcagcgggggtaggggatgggggcagccggggtgggggatgggggcagctggcgggggcgagcacctctgcctattcccgggtccccaagcccctcagccccatgcctgtctacacagcaggattgcttgagcattcaccggaagttatgggcctggggacccaggctgaaaccctgccctcctggtgcttccactctagacaagggggtcagtgacatggtgatgccagttggaggtgacctctgtcaggctgggagcagggcagacaggtgttggtgtaggtgggctccagggcaagaggcagcccccagtagagtgcacggggttttctagcccagctgggaggcatgagaggagaaaggcagctttttgttttctgctcccctttctttttcctcctgagcacttggcaggagctgccatcacctgagatcagggggcttccgggggagctgggggggcttctcggagacagggtctgggcagagatccagtgtggtgggtctgagcaggcaggaggatggaaggcttggagcctggagtcgccgggagtggtctgggttggaaaagtgggtcccggccgatgggtgcgagggtgggtggcactcagggtagtcatggaatgtggaccctgggacacccacgagcctgtgacagcagcagttgtcaactgggcagttttactgccccctccgctccccgcccccccccaggacgtttgccaccgtctgtggaaacatttgtggttgtcactccggagaaggggtggtcctggcatctggtaggtaggggccagggggctggtaaatgtcctgcagccacaggaccaccccctacaaagactcatgcagcccccgggaccacggcactagctgggaaacggatactggagagggaggaggagtcctcgggcgttggtgactttgtctcatcttcatgtgctggagggtatggggggaggagaggaagtggagacagcaggctggaccattgtgtttcactggaacgtttgcctgaggaggaagtgggcttgggagaggttttcttttttatgaaagaagcaatcactgcattgctgatgggaatcatcctgatggagaaatccaagggcaagggacagcagctgggctctactcctgagtgagtctagtgggcttgggggtgtccatgtggtgctgtcccttggcagggtcagggcagctgctagggtgggaccagcagttggggtctgcagcgtggagatgggcaggaagctggagcccggctcatcgtcgcatagcctgcctgcacccgccccccgccaccacctcctggtgggttccgccctcatgccccacctctccctgcagcgggacctggacttcaccatcgacctggacttcaagggccagctgtgcgagctgtcctgctccaccgactaccggatgcgctgaggcccggctctcccgccctgcacgagcccaggggctgagcgttcctaggcggtttcggggctcccccttcctctccctccctcccgcagaagggggttttaggggcctgggctggggggatggggagggcacatcgtgactgtgtttttcataacttatgtttttatatggttgcatttacgccaataaatcctcagctggggtctggctttgtttcctgggggcaaaggaggtttggggttcctttcgcaggtactgcagtgccagcctcagcagtggggggaccggccttggcacctgctggtggctgccattctgtggatctgcgtctcccgtcccccgtctctaggcctcttgctccccttccttggttccttctcggggtccctgtcctccacagctgtctctcagggtctttgtccaactcttttcatccctctcctgggtctgcgcccctcccctctgcggtacccgtgtcctgcctagtaggggatgggggtggctttccagcacagccagccctcaagtttcccagaacagtctccccacctccccccaacactcgacattgttcctctctggctgttttttcctgttcgggtcccttcaaggcccaactgtgcccagccctctgcagctggggacactgagtgggttgggggtgtatgtttgcaaggatagaatttctcatgggggagtggccctgcttcctcccctagaatggcttggggcttagggctggggacttgccctccatggaggtcagtgggagttgcagctgtaaggtggcagggcctacccatcttacagaggtgaagacgaggtccctctgcctctgctgcagacatggcgtctgcacccacccttccaccctcagggcctggccacggggtcctgggtcccccacaatactgtgcactcgacctggttgacccaggacaccctcctcgttgaacagccctggctacacctgcttcagtgcaactggagccctcaccggcgagtgcctgacacctcggccttttctcttccggaggggcgctcctcagtgtgtttggggtctccctcgctccacgccctccagggggccgcatgtgcacttgccctgcattgcctggcccccgaggttccagggtcccaactgtctactaaccggcttcccgacagggtgagggtgaggtcgcatctacaaccagagccagcgcttccccgccgccaccccttttcttggaatcccgctgcttagctacctgcgggtgtcattggccccgccccatttccccacgctttgaagggggcgagtctccacagacctcctagggggatagacagcagctggtgtgaccccacacacccagtgaggtctctggagccgcggtgcgggaagcggggacccgggtttgaatcctgcccctctggtgtggtgcggcctcttcccacagacttttggcctcagtgttccccgcctgggaagtggggactggccctggtacctggctccagagctgcacccagaggcgatcagcccggtgcgggaacggggcggggtggccgcaactacgggccacggatcctgacccgccctgcccacgatgactatccacatcctcatcctgctgttgctcctcgccttctccgcccaaggggacctggacactgcagccaggtgagaaacccgggtggcagcagggacagggcgggagggagaccgtaaagggcgagcgccctctcccggccgcggaacgggcaggtgatctgtaagcctccccgctggtcttggagtgcttgggtgcccacctccatcacgctccatctctcaattcggtttgaacccggttttctcccacgctccctctccaggcgaggccagcaccaggtcccccagcaccgcgggcacgtctgctacctgggcgtatgccggacccaccgcctggcggagatcatatactggattcgctgtctccaccaaggagccctcggggaaggccagccacgagccccaggacccctacagctatgggcgccgccggtggcgcgaggcggaagcccggctcggttcccaggattccggcctgcagcgagggggctagcgcagtgcccagctcgctgggtgacctcgggcacggctcgtcccctcctcggcttcagtttgcctatctgtatgttggagcttctactccacatttcttctcccctaactccagcccctgaaaccgtcttccccagtccctccccgggctgcgactaggttggacctagaagcacacgggaccaggctgggcgaagaacactgacgcccagagccgaataaacaagagttccgtgtttcagtctctgcttctctgtacctatttcgacctctcagtcgaggctgggtctctaatatacctttctctattagccatgctgcttctccctcacggaagtcccactgtctaccttgaatccaacccgctgtggcgcctttcttgccaactcaatccatgcaccttccgtgggtggttttggcgggccgtcctgacccccaaacatccctcctccctccctggcgtgaaagggctgagatttgctccggcaccctacgcgcctgacgttataatgcacctggggtgggctgcgacctcccagctgagccttgttcctcgaagagacaggagactaagagacaatgagctgagtgaggagcccaggaacccgggttccgaacagctgcgtagaatgcgagcggccaaatggtggagaatctggccgggtaaaaggagacggaggactggggatcgaacggatgtaggggattggacgccgtggctcgaagggggcggggatagaacgcggggattggaaggaggcggggataaaacccgggacctgaatacccggctagggacacgagagagaggaatcggggtttctgggtgacggtgatctcggggtgggcaggactccaaaggcccgtcgacccggtggtggactccttgcactgggattggacatatgcaagcgggagatttggggccggcgctcaaaatcggggggcgggggtggactcgggtttggaccccaggatccgatcagcggacccttgattcaacgtggtaagtactggaccccaggggctcgggctccggcggggcctggagtcctgtgtctagggttgggcgtgcaagcctctccatcacttgtcctcgacgctcgcctccgctcacagcctcagcatcccaggctgcgaggcatgcgcagtgggtgcttccttccccattccctccagcacgggcggggggaggggacgctgagcggatgaatttatagacaccatccccctcgccttggcatgaaaagcggcaatggggtggacagcgtcaatgtctaacaggtgtttgtttcatatgggtctaaaactaatgcttttctcaagaccccgcaactcagcctggaccagtttccctcctccacccacccccgaatcttgagaatcctgtactggggggagggcactgcccccgcaccatgttcttgggagagcaggtaaaggggttaacgcgagctatccctctggcctctctatgcgttcccagaggtcccgaattgacgtccttccctcaaaacctccgggtctacaaaccaggaccctcaagacccttcaggtgcttagagaaggatgagctaggttatgtagtcctgggtcggcgcaaaaaggcagctgaaagcgtgagatcccgggtctgagggaggaggggctggggcctgggcttctgggtctgagggaggaggggctgggggcctggactcctggatctgagagaggaggggctggggcctgggcttctgggtctgagggaggaggggctgggggcctggactcctggatctgagagaggagggactggggcctggactcctgggtatgaaggaggaggaggggctgggggcctggactcctgagtctgagggcggaggggctggggtcctgaagtatgactctgcccgactcagggctccagcgtgacatggctgaagcgcaccaggccgtgggcttccgaccctcgctgacctcggacggggctgaagtggaactcagtgcccctgtgctgcaggagatctacctctctggcctgcgctcctggaaaaggcatctctcacgtttctgggtgaggagcggtgctggtcggtttccttccggggatccaggtttctgcttccgggatgtctgaggctcacttccggcatttcagctggttcatttctgggagactatcacccctttttcttagaattttgatgtctgctcccaggacccctttagcaatttctccgtggctcacttctgggatccacagccccacctgctgagaacctctgctcacttctttcacccaagaggggaactgggccccccaaaaactacccacttccagtttctagaactccatatccttcccttatggtgaaattatcatttcttcctttcatctccagcttcttttgtagttgttgtttctgagacacagtctcactctgtcgcccaggctggagtgcagtggcgggatctcagctcactgcaacctccgcctcctgggttcaagcaattccctgcctcagcctcccaggtagccgggattattggcgcacgccaccatgcctggcttatttatttatttatttatgagacagagtctcactctgttgcccagactggaatgcagtggggtgatcttggctcactgcaaccacctcccaggttcaagcgattctcctgcct[131 bp omitted]ccaaagcgcttgggttacaggaatgagccaccgcgcccggcccaaactcctgctctgtccctgttctggaatgcgcatgcccaatgtgtaaccagcacccatgtctgtcccagggtttctggttctagaactcttgcactgtctccatacagggactccctgcttgtcacatcctctgtgtgtgaactggggtctggaacacctgtggggtcatgattgagtttgaatcctgactccaccgcttagtagctgtgtcatcttgggcaagcacctctcttggagtcgcagtttcccctcgtggaaaacatgggtgttgacagcacctccctcacaggatagccttgaagactaaattaattcttctatgtcctggcccatggcgaggtctgagtgttagcttctgatattgttcttcattcattcaccatatatttatggggcatccggtaagggcctggccctctttagcatggagaacacagcagatatcaacagacagaatcacgcctgggcactgcgggctcacggctttaatcccagcactttgggaggctgaggcaggaggatcacttgagcccaggacttggacaccagcctggacaacatagggagaccccatctctattaaaaaaataaagacaggtcgggcacggtggctcatgcctgtaatcccaacactttgggaggctgagacggacggatcatgaggtcaggagatcgagacccttctggctaacacggtgaaaccccgtttctactaaaaatacacacacacacaaattagcctggtgtggtagtgggtgcctgtagttccaattactcaggaggctgagg[139 bp omitted]aataaataaataaataataaagacagaatcctgcttttatagagttctcattcgagttgggggagaaggcaataaaacagatgagcaaaacagaaggcaataaaacagatgagcaaaatatagggtatggtgacattctatagtgtcatctgatattgatggtgacacatgctatggtgaatgataaatc[144 bp omitted]atatagtgaaaccccatctctactaaaaatacaaaaattagccgggtgtggtggcaggcacctgtaatcacagctacctgggaggctgaggcagaagaatcacttgaatccaggaggcagagattgcagtgagccaagattgcgccactgcactccagcctgggtgacagagcaagactccgtttcaaaaaaaaaaaaaaaaaagggggtgggagccggcggccaggaggatctcctgaagctgggatgcttcagcaggctaaactgaacctctgtggtcttgttggttgtataatctgttccagttggcaaacagccactgccttgaactccgaatccctctcccgcccttaccctgggactccttgggcctcaggccagtctaccaact[131 bp omitted]tccgtctctactaaacatacaaaaaaattagctgggcgtggtggcagtcacctgtagtcccagctacttgggaggctgaggcaggagaatggcgtgaacccaggaggcggagcttgcagtgagccgagatcgtgccactgcactccagcctgggcaacaaagcgagactccgtctcaaaaaaaaacaaacatgtggccatccttttcgtgtgtttaaatacatacatacatagatacatacatatttatagacctataaatatatacatgcacacacatatatatgataacattacatggagaaaaatgcacaattttttttttttttttttttttgagacggagttttgttcttgttgcccaggctggattgcaatggcatgatcttggctcactccaatttccgcctcatgggttcaagctattctccttcctcagcttcccaagtagctgagattacaggtgcctgccaccaggcccggctaattttttgtatttttagtatagacagggtttcaccatgttggccaggatgatctcgaactcctgatctcaggtgatccacccgccttggcctctcagagtgctgggactacaggcatgatccactgcacctggcctttttttttttttttttttttgacatggagtcagtctgttgccaggctggagtgcagtggcgtgatctcgacttactgcaacctctgcctcctgggttcaagtgattctcctgcct[133 bp omitted]gcctcccaaagcactgggattacacgcataagccattgcccctggccttttttttgagacagcgtctcactctgttgctgttgcccaggctggagtgcaatagcaggatcttggctcactgcaacctccatctcctgggtttaagcaatttttctgccttagcctcctgagtagctgggattataggttcccaccaccacgcctggctaatttttgtatttttagtagagatggggttttgccatgttggccaggctggtctggaatgcctgacctcaggtgatccacccgcctaggcctcccaaagtgctgggattacaggcatgagctactgcgcccggccaaaccccagtgttttcatttgtaaaatgagatcatcttagtacttatttcacatggtttggggaggatttaaattgttaatccttgtaaatggcacctggaatgtagtaagtgctcattaaacgttagttatctctctgaggcttccaaaggagtttagttagtaacgcagtgctgttggtcgttcctcattcattccatgccctggtacttctagaaggccttactgagctccagaccctgctctgaatagggatcatttttctttttcttttcttttcttttttttttttttttttgagacagggtcttacttactttgttacccaggctggagtgcagtgtcaccatcacagctcacttcatccctgaactcctgggctcaagcgatcctcctgcttcagccttccaagtagctgggactaaggtgtgtgccactgcgcctaatttttttttctttctttttttttttttggagaccttgtcttgctctgtcacccaggctggagtgcagtagcgtgatcttggatcactgcaacctcagcctcccgggctccagcgattctcgtgcctcagtctcccaagtagttgggattacaggtgcctgccaccatgcccggctaatttttgtatttttactagagacggatttcaccatgttggccaggccagtcttgaactcctggcctcaagtgatccgcctgcctcagcctcccaaagtgttgggattacaggcgtgagccaccgctggtcttgaactcctgggctcaagggattctcctccttgacctcccaaagtgctgagtttacaggagtgagccaccacatccggactgttctgcctttgacagcctccccttccaggtcctgcctcagaatatcctcctccagggagccctccctgatgccctcgaactgtaacttggcagcacagggctcctcctatttcttgccctatagcaattaatacttacttcattctggtctgacctcgctgagggcaggacctggatctctctgttccctactagatcttgagcctccagctcagggctccgcactgggtgctcagtaatgtctggggatggcacagaacaggggctcagaggagagggcagatgattcaatggatgccctttcctccccacagaatgactttctcaccggtgtgtttcctgccagccccctcagttggcttttcctcttcagtgccatccagcttgcctggttcctccagctggatccttccttaggactgatggagaagatcaaagagttgctgcctgactggtgaggtccccccactccagcccagtaacccccaatcactctcccttcacccagtaagttcctctgtcattgtggtgtacctgctaaagaaaagtaacctctgagacttacattgggtcagattaataaaggcatggcatgaagaaaaaggaggtgaggccgggcacagtggctcacccctgtaatcccagcacattgggcattgggaggctgaggtgggtgtatcgcttgaggtcaggagttcgagaccagcctggccaacatggtgaaaccttgtctctactaaaaatacaaaaattaggccaggcatggtggctcatgcctgtaatcccagcactttggaaggctgaggcacgtggatcaactgagatcaggagttcaagaccagcctggccaacagggtgaaaccctgtctctactaaaaatacaaaaaattagctgggcgtggtggcaggagcctgtaattccagctactagggaggctgaggcaggagaatcgcttgaacccgggaggtggaggttgcagtgagccgagattgcgccattgcactccagcttgggtgacaagagcgaaactccatctcaaaaaaaaaaaaaaaaaaaaaaggtgtgagctttgctgggcacagtggctcatgcctgtaatcccagcacttttggaggccaaggcaggaggatcacttgagcccaggagtttgagaccaacctaagcaacatggtgaaaccccgtctctactaaaaataacaaaaaattagccaagtgtggtgtcacttacctgtggtcccagctacccaggaggctgaggtggagatcacctgagctcaggaggtcgaggctgcagtgagctgagatcatgccactgcattgcagcctgggcaacagagt[212 bp omitted]aaggcaggataatcacttgaacccggga[136 bp omitted]cgttgttgattgtcaaggccttcatctgtaaaatgaggtatgaataattgcttcttagtgtgcttggaagaattaatcaaaatcctgcctgtcggcgggatgtggtgactcacacctgtaatcccagcactttgggaggctgaggcgggtggatcacctgaggtcaggagcttgagaccagtctggccaacatggtgaaactctgtctctactaaaaatacaaaaattagccgagtgtggtggcaggtgcttgtaatcccagctacttgggaggctgaggcaggagaattgtttgaacctgggaggcggagcttgcagtgaggcgagatcacgccactgcactccagcctgggcgacagagagagactccgtctcaattaaaagaaaaaaaaatcatgcctgtcatatagtcagtagagtgccaggaggtcctcatgggagtggctgcattatttttattgagttattgtgatcttcaggaagggtctgaaaactgggtgcaggtgagatgtcaggtctagttctcggatgagtcctcccggggaggaaggtccacattttgtgcagatggccccaaagaacagacccaggatcagatgtagacaattccaagacggaggccgggcacagtggctcacacttgtaatcccagcacttcggagggctgaggcaggaggcttgagctcaggagttggagaccagcctgggcaacatagagacccctgtctctaaaaaaaaaaaaaaaaaaaaaaaaaaaaaaaaaattcctggaacgctagatttacccccagtctacagagggaaagtgatttgacccaagtcctccaggtgacatttgcaaactttgcaaacaaacatgttgatttaatgtagctttagaccagcttttcctaaatttaagcttgtattggaatcacctggatgggttgttaaaccgctgactatggccaggtgctgtggctcacacctgttatcccagcactttgggaggcccaagtgggtggatcacctaaggtcaggagttcgagagccgcctggccaatgtggtgaaaccctctctactaaaaatgcaaaaaattagctgggcgtggtggcgggcgcctgcagtcccagctactcgggaggctgaggtaggagaattgcttgaacccaggagatggaggttgcagtgagccgagatagtgccactgcactccag[134 bp omitted]acacggtgaaacctcatctctactaaaaataacaacaaatagccgggcgtggtggtgggcacctgtattcccagctactccggaggctgaggcaggagaa[131 bp omitted]caccctgagagattctggcttgttaggtcttaaaggcgcccaggaatatgcatttcgaacaagctcccaggcagtgctcccaggagccacagtttcagaactattgccttagagtagtgatagctggaaggaaaaagtgtcccctcaatagaaataatggctgtcatttattaaacacctaccaacttccatggaaagtgactttggaagcttggtgctgccacaatgggagggggctggagggggtgacagagctcacacctactaaaatgacaaaaatgggtttctctgtctgacagccaaaagatcagcgcaggggctggagggggctggaagggagggaggttctgaggccaggagacccaggcccagcctctgtttctctccccgcaggggtggacaacaccacgggctccggggggtcctggcagccgcgctgtttgcctcgtgtttgtggggagccctgatcttcacactgcacgtggccctgaggctgcttctgtcctaccacggctggcttcttgagccccacggagccatgtcctcccccaccaagacctggctggtatgggaggggcatagccctgctcaggctctcctgggacccgcttatctattcccctctctctgggtctctgtccccctctctctgggtctctgtccctctctctctgggtctcttccccctctctttctgggtctctgtcctcctctgtccctgggtctctgtccccctctctctgggtctctgtccccctctctctctgtgtctccgtccccccctctgggtctctacccccgactctctctgggtctctgcccccctctctctctgggtctctgtccccctctctctgggtctctgtcccctgtctctgggtctctgttcctttctctcttggggtctccgatgctcttaagtctctgtgtccttctctttgggtttctgtcccactgtcgacccctgccccgtcaactccctggctccggtgaggggttaatgacccggtaactcctcctccccaggccctggtccgcatcttctctggccgccacccgatgctgttcagttaccagcgctccctgccacgccagcccgtgccctctgtgcaggacaccgtgcgcaaggtgggcctgggagcgcgcagacgggctggggcggccggggcgggccgggggcgtgacctgccctcttctcccctttagtacctggagtcggtccggcccatcctctccgacgaggacttcgactggaccgcggtcctggcgcaggaattcctgaggctgcaggcgtcgctgctgcagtggtacctgcggctcaagtcctggtgggcgtccaattatgtgagtcccgccaccgccaccaacgccccacctgaagggctaaggttgtgagctcgcctgctaaacttgcgagttatacgccctgccccacgacacgcccacaacccacacgcccccagcccccaagggtcaataccctgagccccgctcacatacatctatatcctaacctccacatttatatatatataaaaatatatatgtatatatatttatttatatataaatatatagtgtatatataaatatatatatttatttataaatatatatatttatatttatatacaaatattaatatttataaatttatatataaatatatttatatataaatttataaataaatatataaatattataaatatattaaatatatttatttataaattataaatatatatttatttataaattataaatatatatttatttataaattataaatatatatttatttataaattataaatatatatttatttatttataaattataaataaatatatatttatttataaattataaataaatatatatttatttatatataggcttatatatttatttatatatatatgctcataacatatatatgctctctctatatatttaatgttgaagtttggggtatagatgctccagtattctgagcttcacccttgatcttccaaagtttgaaccagaattccaggacttagccctggtgcaatgtctcacgcctgtaatgccagcaggttgcgaggcca[134 bp omitted]ctgaggcgggaggattgcttgaacccaggaggcagaggtggcactgaactgagatcgcgccactgcacttcggcctgggccacagagcaagactctgtctcaaaaaaaaaaaaagaaaagaaaaaaaaaaagacaaaaccaaaggagttgaatggtgaggagtggtgggagaggcctgaactccagactgaggatcctggactctttcctgggggtactagggagccatgggagggtttggagcagggaaggggcagggtcagctttggtgtgggggaaagactggagggcgggaggctgcagaggaagctaccgtgagacctaccattgtaggtcattgagacactgggctgggatgagaaaagctgcagcaagagtgagaggggaagggaagagggtccccggcagagccccacgaggcagctatgtggaagcctcagttggtcaaacccagcgaaggggacgaaatatctggagaagtaaaagggaatgcaggccttgcttttctggttaaatatttttttcttcacacttttggacaagattctgtttacacacacacacacacacacacacacacactcatttctttcttcccttccttccctccctccctccctcctttcctaccttctttcctgcctgcctgcctgccttctctctctctttccttcctttttttctgtctccttccttcctttttttctttgagatggagtctcactctgtcgcccaggctgtagtgcactggcaccgtctcagctcactgcaagctctacctcccaggttcacgccattctcctgcctcagcctcccatacctggctaatttctttttttttttttttgtatttttgtatttttagtagagatggggtttcaccgtgttagccaggatggtctcgacctcctgacctcgtgatccgcctgcctcggcctcccaaagtgttgggatttacaggcgtgagccaccatgcccggcctctttctttctttctttctctatctttctctctctccccctccctccctttctgtctctctctcctccctccctccctccctccctccctccctcccttccttccttccttccttccttctctctttctctctctttcctttttctttcttggaaggggtctcactctgtcacccaggctgtagtgcagtggcgtgatcaaagctcactgcagccttgacctcccagactcaagccatcctcccatctcagcctcctgagtagctgggactacaggcatgtgcccctaagcctggctaatttttaaattttttgtagacatggggtcttgctatgttgcacagactggtctcaaactccgaggctcaagctatcctcccacctcagcctcccaaaatgctgagataagaggtgtgagccactgcgcccagcctgtatattttattgtacctccaagccaactgccagtgacacacgcaccatttttttatgtacaacaacaacaacaaaaaaccctacaagagcagctaaaccgtgacacagtgctttcttttgtgtttttcattgtttgaattttatcatggtattggcaaggccacaattttcatgtatttacacatatgtatattatttcacatatttattgttttataaattttacatttatgttctgtttttcttttttgggggggacggagtttcactcttgttgcccaggctggagtgcaatggtgcgatctcagctccttgcaacctctgcctccccgactcaagcgattctcctgcctcaggctaccgagtagccgggattacaggcgtgcaccaccacgtgtggctaatgtttgtatttttagtagagacagggtttcatcatgttggccaggctggtcttgaacacctgacctcaggtgatccacccgcttagcctcccaaagtgctgggattacaggcgggagccaccgtgcccagctgtaccttgttatttccaccagctatgtaatattccactgccggagtataacagggtttagctaactgatcccccatggatggatttctaggtgatcgctagttactgactacgatggctgacttctttggctctatcctccctgcctgacgcaggagcatctggggccttccctgtcctactgtccctcccccaacaggccccagcccctcactgtgtgtctccccaccccgctcccaggtcagtgactggtgggaggaatttgtgtacctgcgctcccgaaatccgctgatggtgaacagcaactattacatgatggtgagaaggggaggggtgaggttcataggccccaggtctagggttggggggtacctgggcggaatgtgacggtcatgctcagtgacctggatctagacgcgccatctgggattcatcattccaccctcttttggggtcaggacctgtatttgggtcagtggctccatcgggggcaaacctgaccctgggtgttttgccatcccctctcctggtccccaggacttcctgtatgtcacacccacgcctctgcaggcagctcgcgctgggaatgccgtccatgccctcctcctgtaccgccaccgcctgaaccgccaggagatacccccggtgagagggccccagtgggttagggatggaggtgtggtcctgtggcctttgggccacgtgggtcctggaaggcagctcacagcccacggtttcctgcagactttgctgatgggaatgcgccccttatgctctgcccagtacgagaagatcttcaacaccacgcggattccaggggtccaaaaaggtgagaccctctcctgtccccactgatggaggcagaacaatatagtggctaagagcatgttttctggagtccgcctgactgagctgggaaccattgcttccttgctgtgtgaccttctgcacgttattaccctctctgagcctcagcttccactaaagtgggataataattgtacctaggggctgggcgcagtgactgatgcctgtaatcccagcactttgtggggccgaggtggacaattgcttaggccaggagttcgagaccagcctagggcaacgtagtgagatccggtctatatacaaaatttaaaaattagccaggcatggtgatatgcacctgtggccccagttaatcgggagcctgaagtggaaggatcacctgagccccggaggttgaggctgcagtgagctgagatctcaccactgcactccagcctggcgacagagcgagaccttgtctccaaatactaagtaaataaaagtcctagggtgctgatgattactagggtactttgaacaactgacgacacctaagaagtatataataaatggtcactatttttatgtgtctggccttcctgcccccatgcttctgccaacgccacccctagactacatccgccacctccatgacagccaacacgtggctgtcttccaccggggccgattcttccgcatggggacccactcccgaaacagcctgctttccccgagagccctggagcagcagtttcagagaatcctggatgatccctcaccggcctgcccccacgaggaacatctggcagctctgacagctgctcccaggtaagggtcaggggtcaggggtcaggggctctcagaggccgccagtgtcctgagactgtggaagggcagggtggggccaggtggcggctgggcaggatggactcaggcacatcccgggccctccaggggcacgtgggcccaggtgcggacatccctgaagacccaggcagcggaggccctggaggcggtggaaggggccgctttctttgtgtcactggatgctgagcccgcggggctcaccagggaggacccggcagcgtcgttggatgcctacgcccatgctctgctggccggccggggccatgatcggtgagtgagtcttgggatggggcccccagatgtggcacccgagaatccagtatcagacctaggacccctgacagtagacagccagaccctggagcccacacctgcagagtctgtagaccaggggctgcatagagctgaggaccccagacccagtgctttgggacctggagacctctgacctggggaacccctcaacctgggacccaagacctataaaccagacccagtgacccccaaatctgagactcccaaacccctgagctggaccctccgacccagagaactcagcatcacagacccagagaccccagatctgaggaccaccaaacccaggacccctaggcccagggaccccagacttggcaacctcagcctcagaacttgaaccattcaatcctcaggccttaatgcaggcaccccaaatccatggccctagacccagacttccagacctagagattctcaggcctggcaggcatcactgaattcctaggccccaggggggtcccgctgacctcccagcacccccaaaagccttgaaccttcctcggcaagtttcctaaaaatctccaaactccagactgggcatggtggctcatgcctgtagtctcagcactttgggaggctgagaggggcggatcacctgagatcaggagtttgagaccagcctggccaatatggtgaaacctcatctccactaaaaatgcaaaaattagctgggcatggtggtgcatgcttgtgatcccagctacttgggaggctgaggcggga[133 bp omitted]aaactctaaatcccagacatgtcttggagacctccagggccactactggggacccccaatggtcctagagatccccataccagcaccccaatggattcccacatcttcccatctagaaaaccccctcaagtcccacagaaagcactctgaggtccccgtgcccctcgctcttggtgacccatctgaactctccctgacagctggtttgacaaatccttcaccctaatcgtcttctctaacgggaagctgggcctcagcgtggagcactcctgggccgactgccccatctcaggacacatgtgggaggtagggcggccagccctccctggttctggggacccctgccccatctccaaagaccgtcctctccagcgccttagtgtcagaagaaaaactgaggcttggccgggcacggtggttcatgcctgtaatcccagcattttgggaggccgaggtgggcggatcatgaggtcaggagttcgagaccagcctggccaacatagtgaaaccctgcctctactaaaaatacaaaaaaattagccaggcatggtggtgtgtgcctgtaatccctgctactcgggaggctgaggcatgagaatcgcatgaacccgggaggtggaggttgcagtgagctgacattgtgccactgtacttcagcctgggcgacagagcaagaatacatctcaaaaaaaaaaaaaaaaaaaaaaaaagaaaagaaaaactgaggctcagggagaggcagaggctggcccagggtcacctggcaaagaaaggggactgggatgaggaccttcctttgatgagttggtaactggggctcaaagaagggaagtgattttcccagagtcacacagcgaggagttacagagcaagaagatgactccaggctgggtgcagtggctcatgcctgtaatcccagcactttgggaggtcaaggcaggaagatcaattgagcccaggagtttgagactagcctgggcaacataatgagaacctgtctacaaaaaacgttaaaaaaaaacaaaaaaaacaaaaccagccagtcatggtggtacatgcctgtggccccagctactccggaggctaaggcaggaggatggcttgagcccaggagtttgaggctgcagtgagttataatttcaccactgcacaccagcctggatgacagagcaagaccctgtcaaaaaaggaaaagaaaataaggacagtaaacaccagttgagtattggtgttagtcctgttcttgatgaacatgaacctgagaccgcatctgtgaatatcagaggtttctgtttctcagggactgccccctacccgaaaaagggctgcatgaaaagaggtcccgggttagatggcctcagtccacagggaggaagggactctaacagcctctgtttgcccacagttcactctggctacagaatgctttcagctgggctactcaacagacggccactgcaaggggcacccggaccccacactaccccagccccagcggctgcaatgggaccttccagaccaggtgaggctgggtttctgggcctctcctccaagtcccaagattcctagccttgacttcaaactcatccccacccctaatctgaacgtgaaaatcaaccccattcctacccccaacccgaaacccatgcttcccccacccccaaatcaggccatatgcatccacaacctcaaaccccaacacgaacctcatctccagccccaactccaaccgtcctcccactgccaatcccatcctcaaccccaaccccatctctacctgtttcagactcaaaaaccaccactgtccaaccccagcaccaacccctactccattttccttccaaatccatctccatacccaatcccatcccaacaccacctgaattcattcccatgttcatcctaactccaccccataccaaaccctaaccccatacccaaccccaaccccatcctgtactcagccacgaccccacttccaatgacaacccatgcccaactcatcccatacccaacctcaaccccataccccacaccaaccccatcccgtactcagccacaaccccacctccaaccacaacccatgcccaactcgaattcacttcccatacccaaccccttccccgttctattcccaaaccactctcagtccctcctccatccccatccccaaccccagcttcaactgtggcccaaccccaatcttgttccagtctacacatgccatccctatccccatttttttttttttttttgagatggagtcccgctctgtcacccaggctggagtgcaatgacacgatctcagttcactgcaacctccatctcccaggttcaagcgattctcttgcctcagcctcctgaggagctgggattacaggtgcccactaccacacccggctaaatttttttatttttaatagagatgaggtttttccatgttggccaggctggtctcaaactcctgacctcaggtgatccagccacctcagtctcccaaagtgttgggattacaggcgtgagccaccgcgcccggcattttttttttgagacggagtcttgctctgtacccaggctggagtgcagtggtgcgatctcagctcactgcaacctctgcctcctgggttcaagcgattctcctgcctcagcctcccaagtagctgggactacaggcacgtgccaccacggccagctagttttttgtatttttagtagagacgaggt[139 bp omitted]tcttctcttctttgtccccatttccatattctgccgcaaccttaactccacatccacctccgcttccagccttattcctggctttcaccctacccccatctgtaaccccaactactcctcttccctcctcctctggcagatccactcctccatctctctagccctgaggggagccaagatcttgtctgaaaatgtcgactgccatgtcgttccattctccctatttggcaagagcttcatccgacgctgccacctctcttcagacagcttcatccagatcgccttgcaactggcccacttccgggtcagttgggttccccatccacagcccccgcagggtctcagtccacctgagcccccaagacctgcccctccacggttccttgtggtcgctgccattgtgggtcggccatcttgaattctctcttccaaccattcttgggctggctggaggaggctggaggtctggacagagataggtcaagtctgtaagatctcctgagcccagctgacagactcctcttctcctccctgtcccccaggacaggggtcaattctgcctgacttatgagtcggccatgactcgcttattcctggaaggccggacggagacggtgcggtcttgcacgagggaggcctgcaactttgtcagggccatggaggacaaagagaagacggtgggtgcagccctcgcttgaggcttcagttatttctgtgtactcactcatccacttgcaaacgttgatgggacctactgaagccagcctccacgaggagcacaagggacaagggatgaatcggacctggcctctgacttcaaagagctcactgatggggggagacagcccagcatagtgtgatatctgctttcatggtggtctcacagggcactgggggtgcacccaagaaggaaccccatttctttttttttgagatggagtcttgctctgttgcccaggctggagtgcagtggcacaatctcggcttactgcaacctctgcctctcaggttcaagcgattctcatgcctcagcctcctga[224 bp omitted]ctctttgtgacttgtgaccttcctttgcacccctgtaccctctctgcccagatcccacctgccctgcacctcttctcccttgccctacacctagccccgcacctacaaggtattgtggttccatggaaggagtttggactctggggccagacacacctaggaacccgcctggctctccctggctgtgtgaacctggccaaatgatttcccctctctaagcctcagttccccatctgtaaaatggggttgatattcccaccttgcagggatgtggcaaactcagttgaggccagatgtgccgcaggcccagccctaagtcgacttcctgtctttccatgacctgtgacctccctggggactgcaggacccacagtgcctcgccctgttccgcgtggcagtggacaagcaccaggctctgctgaaggcagccatgagcgggcagggagttgaccgccacctgtttgcgctgtacatcgtgtcccgattcctccacctgcagtcgcccttcctgacccaggttggggcacagggaaagggttagagagggaagtgggagaccatggaagaagggagaggtttcagggaaggagggtgatgttgaaaaaggacccatcaaggccgggcacggtggctcacgcctgtaatcccagcagtttgggaagccgaggcaggcggatcacttgaggtcaagagttcgagaccagcctggccaacttggcgaaaccctgtctctactaaaaatacaaaaattagctgggtatggtgacaggcacctgtaatcccagctacttgggagggctgaggcaatagaatcccttgaacccgggaggcggaggctgtagtgagctgagatcgcaccactgcactccagcctggacgacagagcaagactctgtctcaaaaaaaaaaaaaaaaggagggtgatgttgagaaaggatgcgtcagcagagaagtcagttgtgggggggcggcaaggcagaaggcggagaggcaacgggacaacgggagcagacaaaaggggagagggtcagtggggtggggataagaggaaagggcgtggtcagaggaggggcgtggtccgagggagaagaggagagggacgtgggtgtgggtggtgagacgagtgaggggcgtggccagatagggcgtggtcaggagaagggcgtggttagggagaaggaggcccggatttacgggtaaaaaaaaagccagggatgcagggagtgaagtggagccaagggccggaactgcagatctctgtcctgcacatgtgatgggctcctgtcctcaggtccattcggagcagtggcagctgtccaccagccagatccctgttcagcaaatgcatctgtttgacgtccacaattacccggactatgtttcctcaggcggtggattcgggcctgtgagtggagctgggcgcgctggcccccagaggaaagagggggctggggggcctgcactcctgcatagtgggggtggaggggaccggagctattttcttcccttcactctttccgtctccaggctgatgaccatggttatggtgtttcttatatcttcatgggggatggcatgatcaccttccacatctccagcaaaaaatcaagcacaaaaacggtgagacaaacgtgtatacccaccaactccctctttcctcaggaaccaggagtctgggcccccagcccctcctccctcagacccaggattccaggccccagcccctcctccctcagacccaggagtccaggcccccagcccctcctccctcagacccgggagtccaggcccccagcccctcctccctcagacccgggagtccaggcccccagcccctcctccctcagactcgggagtccaggccccagctcctcctccctcagactcaggaatccaggcccttagccctcttgtttctcagcctccaggatcccatctcccagcttcccctggctctgacctgttctccttccaggattcccacaggctggggcagcacattgaggacgcactgctggatgtggcctccctgttccaggcgggacagcattttaagcgccggttcagagggtcagggaaggagaactccaggcacaggtgtggatttctctcccgccagactggggcctccaaggcctcaatgacatccaccgacttctgactccttccagcaggcagctggcctctccaaggaataagggtgaaattgccacagctggctgacacaggacaggggcaactggtttggcaaccccacatccaggccaataaagatgtgtgagctgggtgtgtggtgtctgctatgctcttgggcagggcaggggtagaagaggtaaggaccagggtggaggaggacagaagctcccatccattcccaggcccagccagggattcccagttgcagtcacagcttcaaccacagcccgcaacacctgcccagtgtacttcatttccagcttcactcataccaaacccaaccctccaaggccagtgccaatcaaacacaacctcacaagttctcctgagcctaattcctgctgccccaacaccactgtccacctcaaatccatctccaggccgggcgcggtggctcatgtctgtaatcccagaactttgggaggccaaggtgggcggatcatgaggtcaggagatcaagaccttcctggcgaacactgtgaaaccccgtctctattaaaaatacaaaaaaattagccgggcatggtggcgagcacctgtagtcccagctactcgggaggctgaggcaggagaatggcatgaacccgggaggcggagcttgcagtgagaagaaatcgtgccattgcaccccagcctgggggacacagcaagactctgtctcaaaaaaaaaaaaaaaatccatctccaaacctaaagatccagccaccccaattgacaatccccaaacgaacccacgaaaatttttattacccaaccccaactccagccatttctttttctttttctttttttgagagagagtcttgttctgtcacccaggctggagtgcagtggtgcaatcttggctcactgcaatctctgcctcctgggttcaagcaattctcctgcctcagcctcccgagtagctgggactacaggcatccgccaccatgaccggctaatttttttttgtatttttagtggagacgggttttggggtttcatcatgttggtcaggctggtctcgaactcctgacctcaaatgatccacccaccttggcctcccaaagtgctgggattatgggcatgagccactgtgcctggcctactccagccatttcaacctcttcctcaatgacggattcagctcccataactaggaaatgcactgcccagtgcacaccaccctaacgctgccatcattccagcaatcagcaactccatgatgccacaccccactatacacaacaactcaactacagttcgaaccacacaaccaacacaacgtccaactccaagctccaccatccccaccaaatatcccttctcatttccaccataacccacactttaccttgacccatagtgatgactttatttttatttatttatttatttatattttaagacggagtcttgctccgtcgcccaggctggagtgcagcggcgtgatctcagctcactgcaagctctgccttccgggttcatgccattctcctacctcagcctcccgagtagctgggactacaggtgcccgccaccacgcc[182 bp omitted]tgtgctccaccacccccaccattacaatctccaccagcccaactacagccatcaacaccaaacccaatcacccaccccaccaataccacggttccaacgcgccatcaatctaaccctcactgcttctgagtcaaacaataatacaacccaacaacaaaatcaaaattctaaatggctcaacctctaccagcccaaccaccccagccagactgccaactctgtgatggtttaaaaaatgtccacaagtgggggctgggcacggtggctcatgcctgtaattccagcactttgggaggcggaggcgggtggatcacctgaggtcaggagtttgagatcagtctgaccaacatggagaaaccacatctctactaaaaatacaaaattagctgggcatggtggtgcatgcctgtaatcccagctactcaggaggctgaggcaggagaactgcttgaacccgggaggcagaggttgtggtgagccgggatcgcgccattgcactccagcctgggcaacaagagtgaaaccccgtctcaaaaaaaaaaaaaaaatagtgattaggtcacaaaagacattgtggctttcttttggccgggcatggtggctcacacctgtaatcccagcactttaggaggctgaggcgagctgatcacgaagtcaagagatcgagaccatcctgaccaacatggtgaaaccctgtatctactaaaaatgcaaaaattagctgggtgtggtggcatgtgcctgtagtcccagctactcaggaggctgaggcaggagaatcgcttgaacccgggatgcggaggttgcagtgagctgagattgcaccagtgcattccagcctggcaacagaacaaggctgtgtctcaaaacaaaacaaaaaacaaaacaaaacaacacaagacattgtggcttccttcttgctctgtttctcaatcacttgctctgggggaagccagccaccatgtcatgaggacactcaagctgcccatgaagaggcccacgtggtaaagaactgagacctcctgccaacagccagtgaggcacacatgagtgagccatcttggaagcagatcctccagtcccagtcaagccttcagatgactgtcacccggctgacagcttaaccacaacttcatgagggacacggagccagaaccaccttagctaagctacttttgatttcctgacttttaacaactatgtgagataataaatgtttgttaattcaagttgctatactttggggtaacttttttttttacacaggaataaagaatacaaactgcaaacacctcagcctcaaccctcatattcttttttgaaatttgcttttatttttatttatttttttgagacggagttttgttctcgttgcccaggctggagtgcaattgcacagtctcggctcaccacaagctccacctaccccggttcaagagattttcctgcctcagcctctcaagttagctaggattacaggcaggcaccaccatgcccggttaattttgtatttttagtagagacggggt[136 bp omitted]aggctggagtgcagtggtgcaatctcggctcactgcaacctcctcttcccaggcccaaatgattcttgtgcctcagtctcccgagtagctgggattacaggcgtgagccactgcacctgaccaagaaatttatttttggttggaatactgcctggcgcaatctcggctcactgcaagctccgcctcccgggttcacgccattctcctgcctc[225 bp omitted]ggtcctcaggggtacagaattggattaatcataattgctggtccttggcacatactattattatgtgtaccacttcttaagctattatctcttggcttcaaatctatttcccagcactgggctttgggtaactgggaatgggactctgaaaaccccactttcactttgccaagtggtgtgttagcctctgccaatagggggtgccagactgaccgtagagcctgaaggaggaaaagggttcttgctccttcctgtttgctctctgcttacttcccgttggtttcctgttctcatctgcgtcagcaaagcttcttcaccctgtccaaggcagttctttcctgtagcagcagctaaatccaatttgcagtttttccaaacttgcacatcctcagagatgccagaccatttggggatgccagaccagcacccctgcctgagaaaattccagtctcgggccgggtgcggtagctcacgcctgtaattccagctctttgggaggctgaggcgggtcaatcacgaggtcagaagatcgaggccatcctggctaacacggtgaaatcctgtccctactaaaaatacaaaaaataagccgggcatagtggcgggcacctgtagtcccagctactcgggaggctgaggcagggcaatggcatgaacccgggaggctgagcttgtaatgagccaagatcacgccactgcactctagactgggtgacagagcgagactccgtctcaaaaaaaaaaaaaaaagaaagaaaattccagtctctagtgatcctcctctgagctcagaaacaccagcaccatctgagcagtgcctcctcttcagagcctcagtttttttttttttttgagacagagtctcactctgtagcccaggctggagtgcaatggcgtgatcttggctcactgcaaactccatctcgcgggttcaagtgattctcttgcctcagcctcccgagtaatggattgcagacgtgcgtaaccacgcccagctaatttttgtatttttagtagagacaggttttccccgtgttggccatgctggtcttgaactcccaacctcaggtgatccacccgccttggcctcccaaagtgctggaattacaggcgtgagccactgggcccagcccagaggctcagttttatgtccactggctcctgatccaaatgtatagtttttaataactctaacctttgtctttgtttttcataccctagtgagataggaatttggcaagactggtttccaagacaacaggacacaagacctcactcataagacagaaaacagcaaaagaaactggctaaaaccagctagaaccaagaggacaatgaaagggacctctggggccgggcccggtgcctcatgcctgtaatccctgcacctagggaggccgaggcgggtgaattacctgaggtcaggagttcgagaccagcctgaccaacacggagaaaccctgtctctactcaaaatacaaaattagcccggcgtggtggtgcctgcctgtaatcccagctacctgggaggctgaggcaggagaatttcttgaacccgggaggcagaggttgtggtgagccaagatcgcgccattgcactccagcctgggcaacaagagccaaactccatctcaaaaaacaacaacaactaaaaaggaagtgacgtctggttactttcactgctcattatatgctaattgtaatgcattaacatgctaaaaacactgccaccagcaccatgacagtttacaaatgccatggccatgctgaaaagttaccctgtgtggtctggacggggtgaaagcccaggttctgggaactccctgcctcttatctagaaaacccatgtgtaattcaccttttatttagcatatattcaacaactaaccattaaaataaccaaccaacgatcctcagagctactctgcctatgaggttgctactcttactttcctttctttctttttttttccaattgtaaagtgctgatcctgtttatttggcaggaaaacgagacaatccagcagcccaggagggacaggtggacttaatcctcctcctcgtcgtctccagccccaccctcaccctggcccttcttggcgttcttcctcttcacgcggccggggcggccaccccatagggagagcgcagagacaagtcgatgcgcttctgggaatccaggcggacaatgaaggacgggatgttcgccacctgattgcggaccctgacacggcgctggcggatcagtacgccagcgtggtggatggacttggccaagcccagcttgaagacctgggtctgtaggcgtctctctaagaaatcctctatcttcaggcccaggatgtaatccagcttcgtcttgccctcatccagcaccccaatgcggagcagccgccgcagcaggacgttgccttcaaacagacgccgtgggtccttctcatcaagcgtcagcagttcccgggcggccttgcggatgttggccaaggtaaatttgaccctctagacctcacgtttgttccggaacccatactcgccgatcagcttcagctcttggtcgagacgagatttctcgaagggtctccgcggggtcacataagttttgtgacaaacccagctccgggccactggcatgttggctccgcttccccgtctgcgcctgagtgcaggacccgttcactgagaaagagctcctttctttttcttttcttttttccttttcttttttttttttttttcttttttctttttttttttttttgagacagtctcgctctgtcgcccaggctggaatgcactggcgcgatctcggctcactgcaacctccgcctcccgggttcaagcgattctcctgtctcagcctcccaagtagctgggactacaggcgcccaccat[174 bp omitted]acctgtctcaggccttttctcgtattttacttttctgctcttagtgccaaaatgcatgcttatgacgcttatttcactgttggactggtagcatttcttctggctatttgagcaatttttgctattctgtatcaggtagggcactttccttgttttgaattctttattttggagaggaacccctttgttctgactctgggatgccggagtcacattgttccatagcctcagttgtgcctttggggttcactgttggccaccctcaggatgctccagggttttcggcatttggtgtggggacccttggtgactgatatctggaggccccaggtcttttggtatttggtgccctggattcaggttgcgtggttgtactggtagccagactcaaatttgttttttttgttgtacggagtctcactctgtcgcccaggctggagtgcagtggtgcaatggctcactgaaacttccgcctcccaatttcaagcgattctcctgcctcagtctcccaagtagttgggactacaggcctgcaccaccacacccagctaattttttttttatttttatttttatttttttttttttttgagacggagtcttgctctgtcacccaggctggagtgcagtggcgggatctcggctcactgcaagctccgcctcccgggttcacgccattctcctgcctc[224 bp omitted]ggccaggctggtcttgaactcctgacctcgtgatctacctgccttggcctcccaaagtgctgggattacaggtgtgagccaccgtgcccagcctgtttgagaccgagtttcactctgtcgcccaggctggagtgcagtggtgcaatctcggctcactgcaacctcctcttcccaagcccaaatgattcttgtgcctcagtctcccgagtagctgggattacaggcgtgagccactgcacctggccagaaatttatttttggttggaatactgcctaggtcattacaaactggaaaaccagaaattttagcctaaaaatagttctttgcggccaggtgtggcggtcatacctgtaattccagcagtttgggaggccgaggtgggtggatcacaaagttaggagtttgagaccagcctggacagcatagtaaaaccccgtctctactaaaaatacaaaaaattagcttagtatggtgtcatgcctttagtcccagctacttgggaggctgaggcaggagaattgcttgagcccaggaggcagaggttgcagtgagctgagatcatgttactgcactccagctgggtgatagagactgtctcaaaaaatatcaatcaatcgataaaatagaggacgtgcgcctctttctgagtctgatttggctttatgtaaggataagtttggccagtttttggagaatccagtaatttattgaagagtttgttaagttggccatgtcctgtgacctgacttggcatgactaatggatattattgtctacctgctctacagtagaggaaaaacagaggattctaggcactccccatgaaaccacaaatggaatggccacttgcaatcaaagccatgccatttattgggaggagggaatgcaaccccagattggcccctgatctggttttggctgtgtccctgcccaaatctcatattgaattgtagctcccataattcccccatgtcgtgggaggaacccagtgggagatacttgaatcatgggggaagtttcccccatactgttccggtagtgaataagtctcatgagatcagatggttttataaggagtttccgcttgtgcttggctctcattctctcttgcctgccaccatgtaagacgtgccttttgcattctgccatgattgtgaggcctccccagctatgtggaactgtaagtctattaaacctctttttcatccttttttttttttttttttttttgagacagtcttgctctgtcgcccaggctggagtgcagtggcacaatctcggctcactgcatcctccacctcctgggtttaagcagttctcctgcctcagcctcccaagtagctgagattacaggtgcctgacaccactcccggctaacttttaaatttttagtagagatggggtttcaccatgttgaccaggctggtctcaaactgctgaactctagtgatccgcctgccttggcctcccaaagtgctgggattacgggcatgagccactgtccctggccagtaacaaagttttagaagtacagagtgttagggccaggtgtggtggctcacgcctataatcctagcattttgggaggctgaagtgggtggatcacctcaggtcaggacttggagcattttgggaggctgaagtgggtggatcacctcaggtcaggacttggaagaagagctgaggcagggcttgcttgtctgacataatgtaaaagagtctggaacatgtcctgggtccagggtctcaaacccctcgtggcctatggaacaccaagctctgtgcctaagggtggaaggctgccctgccacactgcaatctaagcccaggacataaaacccctcgtggcttgtaaagaatccagggctctgggcataaaacccctcatagcctctggaatgtgtccagactcgctggccccttgctccttgctctcccaagatcataaactggttgtgtcttgagtgaaaagaacctgttctcctttatctcaactagcagagcatacgctaaaccgtcatagctacgcttggtgcaccactacctttctacccccatgtccgcacgtcctcaccacctgcttctttgtttgattaccaataaatagtgtgggctcccagagctcggggcctttgcagcctccatacaccagcgttggccccctggacccatcctatgtactcttaacttgttttgtctcattcctttgattccgccggacttcgtagcccccacgacctggtgttgggtctgatcaccccaacaagcctggtcaacatggtgaaagcccgtctctactaaaaatacaaaaattagctgggtgtggtggtgaatgcctgtagtcccatctacttgggaggatgaggtaggagaatcgctggaacctgggaggaagaggttgcagtgggcagagatggcgccactgcactccagcctgggtgacagagcaagacttcatctcaaaaaaactaaataggctgggcgcaatggctcacacctgtaatcccagcactttgagaggccaaggcaggtggatcacagggtcaggagattgagaccatcttgactaacaaggtgaaaacccgtctctactaaaaatacaaaaaaaaaaaaataaaaaataattagccgggcgtggtggagggcacctgtagtcccagctaatcgggaggctgaggcaggagaatggcatgaacccggga[132 bp omitted]taaccccattgtgtcactctctcttgagcctgcccacatgcctttttcttgtgtactttttgctttgcaataagtctccttactttcactatcttctgactcatccttgaattccttacttctcgtgatgatgtcaagagcctggcatttggggacctctcacagcccactggtatcaccttttttttttttttttgagacagagtgttgctctgtcgcccaggctggagtgcagtgggacggtctcagctcactgcaacctccacctcccagattcaagtgattctcttgcctcagcctccagagtagctgggattacaggtgcctgccaccatgaccatctaatttcttgtatttttagtaaacacggggtttcaacaggttgcccaggctggtctcaagctcctgacctcaggtgatccgcctgcctcagcctcccagagtgctgggattatgggggtgggccaccatgcccggccaacaatgatgtttcttttcctcgccgtcttagacattgctttaggaaacactctctattcgaattatttattagacctcgcctgctcccataggaaacttcccaactagacggctgtccctttaaaactgttttcctgcaatgttacccacctggcctggcctcagtactataataatacccatgccatctctcctacaggcaatggtatctactttgtaccacttattcaatgccatttatagggcaagtttttttttgttgttgttgttttttttttaacaaagtatcgctcttgttgcccaggctggagtgcaatgcgtgatctcggctcactgcaacctctgcctcccaggttcaagcgattctcctgcctcagcctcccaagtagctgggattacaggcacctgccaccatgcctggctaatttttttgtattttcagtagagatgggggt[148 bp omitted]catttttgccctgatggtaccatcaaatacatttcttcttgtctccctggagggtcttagtccctctgtagacaattatgcccttctctactcccatagctgcctctcataataatggtattattttaaattaccactttccagtcaaattctttttttctcttttttttttgagatggagtatcactctgttgcccaggctggagtgcagtggagagatcttggctcactgcaacctccacctcctgggtttaaataattctcctgcctcagcctcctgagtagctgggattacaggcacccgccaccacacccagctaatttttgtatatttagtagaaatgaggtttcgccatgttggccaggctggtctcaaactcctgacctcaagtgatctgcccacctcagcctcccaaagtgttgggattataggcgtgagccactgtccctggcctccccccaaattcttatcccattcatgcttaaaccaaagcgtcacttagataacagagatgctcaaccttcttaactcccctcccacatgggtttgtgctcccaatggatacctttggctatatggacgctgtagtagtccgttgtcacactgctataaagacatagctgagactgggtaatttataaagaaaagagttttaattgactcacaattctgcatggctgggaaggcctcaggaaacttacaatcatggaggaagggaaagcaggcacgtctcacgtggtggcaagagagacagaggggcaagcgcaggaacaactgcctcataaaaccatcagatctcatgagaactcactcactaccacgagaacagtgtggggaaaaccaccaccatgatccaatcacctcccgcctggatcctacctcgacgtgtgcggattacgggcattacaatttgagatgagatttgggtggggacacagagccaaaccatatcagatacccattcagtcagcctccaaataacttttctttcatttgaaatcataaaacccatggttaacagtgtattgataacatttgtttcaggggtcaatgtataacaggacaggcaaagccctctaatatacagttacatgacatcactcacccaagtgctaagcaggcagttggccttatcttggctgaagttggggctgccatcaacttgttggccccatggggaggatttgcccatcatgaggcaactcttcaaaactttacttcttcacttagccaggcacggtggttcacacctgtattcccagcactttgggaggccaaggcaggtggatcatgaaatcaggagatcgagaccgtcctgactaacatggtgaaaccccgtctctactaaaaatataaaaaattagccaggtgtggtggtgggcgtctgtagtcccagctactcgggaggctgaggcag[139 bp omitted]tacactgctgtctcatagactacaggacagtttagataaattgagactgtcccttgattctgtaacagatgtagtaatgggtaacagattagcattagtctatccatggtctaatggaacattagtaattagtatggtcagtggaacaactgtaattaataaaacctgctgtacctatataaacacctcagatcaaatggagaaaaatatcaacaagatatacaaacaactacctggctaccttcatcatactcagactggtacagaacagctggggtcccggctaaaccctatccttaagcctggaaccgccgccctaagtgaaaacagctgaccccatttttccatccaaatgttgcctttttggcctgccacacctctatcctgtgcccacaaaaagactgccgctggcagagcaacacaagcggctgatggctgagcatcaaagactacggatagacacggctaacttcagatggcgcagcttcagggaaagatcaccttcttcccacaccctcccctggcctccattccactgagagccacttccatcacccaataaaatcctccccatacactaccctacaatctgttcgtgtgacctaattcttcctggacaccagtcaagaacccggatgctgagagggcaggggcttggacgctcccgcacagagcctgctcccaccagagaggagtgactggccggctccagcgtttgttcccttcagttcctgcactcgcttgctcccacgctccctctcatgaggagtcaccagcagcaggctgagccaaaaaagccactccagttcccgcccatgaagaggatcaaggtcaaggtgatgtaggagttaagacgaaatcacttagactgatagggcaagggagtccttggtaaggctttcctttttaatgaaaagcagccccgaatcattttctaatgaagagcggcttgtaaagttgagctgcagagataggcatgcaagctgggagcttgcctgggtgaacgccggcctggcgggaacaaggaactagggactagacatgttcaatatggtggctccatcttcccttctctgccagccacgtgtacagttaacgagcagacaagagggctctggcc[139 bp omitted]atggtgaaaccccatctctactaaaaatacaaaaattagctgggcatgatggcgggtacctgtaatcccagctactcgggaggcggaggttgcggtgagccgagatcgtgccattgcaccccagcctgggcaacaagagcgaaactctgtctcaaaaaaaaaagaaaagaaaaaagaaaaaaagattaaggaggcctatataatgtttgagcagggaataaagtaggaatttggcaggactaacttccaagacaacatgtgacacgaccctgctgataacacaggagacagtaaaagaaactggccaaaaccagctggaaccaagacaggatgaaagcgacctctggctaccctcactgctcattatacactaattagaatgcatttgcatgccaaaaacacttccacccgcgccatgacagtttgcaaatgccacggccatgctgagaagttactcagtatcatctggatgggggagaaaattcgggttctgggagctccctgttccttacccagaaaactcatgtataatccaccccttatttagcatataatcaaaaaataactataaccataaaaatatatcaaaacagccaaccaatagcccttaggactactctacctgtggggtagccactctttgattcactccgtttttttttttttttttctggagacagggtctccctctgtcgcccaggctgctggagtagagacatattctcggctcattggaaactccacctcccaggttcaagcatttcttgtgccttagcctcctgagtagctgggactacaggcacacgctaccacacccggctaatttttgtatttgttttgttttttgttgttgttgttgttttgagacggagttccactcttgttgcccaggctggagtgcagtggcaccatcttggctcaccgcaacctccgcctaccgggttcaagagattctcctgcctcagcctcccaagtagctgggattacaggcatgcgccaccacgcccagctaattttgtatttttagtagagatggggattacaggcgtgagccacagcgcccggccaatttttgtattttttagtagaaatggggtttcaccatgttggccaggctggtcttgaactcctggcctcaagtgatccacctgccttggcctccaaagtgctgggattacaggggtgagacactgcacccagccccttttttcctttactttcttttttttttttgagacggagtttcacttttgttgcccaggctggagtgcaatggcgtgatctccgctcactgcaacttctgcctcccggtttcaagagagcctcctctctcagcctcccaagtagctgggattacaggcacatgccaccacgcctggctaatttttgtatttttagtagagatagggtttaatcattttggtcaggctggtctcgaactcctgacctcaggtgatccgcccgcctacacctcccaaagtgctgggattacaggcatgagccaccacgcctggctattcctttacttccttaataatcttgctttcactttactgaatccacttgctcttcaatgtattattttttttctagacagggtctcactctgttacccagactagactgcagtggtaccatcatggctcacgatagcctcaacctcccagactcaaacaaccctccggcctcagcctcccaagtagctgggactacaagtaggcaccaccatgtccacttggccaatttttaaaattatttttattttcatttatttatttttttgagacagagttgcccaggctggagtgcaatggcacgatcttggttcactgcaacctctgcctcctgggctcaagcgattctccagcctcagtctcccaagtagctgggattacaggtgcgtgcctccatgcccagctaatttttgtattgttagtagagacaagatttcactatgttggtcaggctggtctcgaactcctgacctcaagtgatccgccagccttggcctcccaaagtgttgagattacagggtaagctaccgcgcctgagctaaaattatttttagtatagacagagcctcactatgttgcacgggctggtcttcaactcatgttgctcttgaattctttcctctgtgaagccaagaacccacttggcctcccagactgaaccccaattttggggtgcgtcctgtgacagcaggaccaatataatgctgtttcctgtagttactgccaccacaataccacagggtcctctttttgccttttcagtttcctagttaccaatcctttaatacctaaatttatttatattcgatcatctctgttaaaataaccagtgtgatttctgtctcctgaatataccctgactgacacagatatttgtaataggaaggagctttccaaaggtaggttttggaaaattgtttattcatttatttatctattattattttttgagacagggtcttactctggcgcccaggctgaaggagagtggtgtgatcatagctcattgcagcctcgagctcctgggctcaagcaatcctcccacctcagcctcctgagtaggtgggaccacaggcatgcaccaccatgcccagctaatttttattttattttattttatttatttatttttgagacagagtctcactctgtcgcccatgctagagtgcagtggagccatctcggctcactacaagctctgcctcctgggttcacgccattctcctgtttcagcctcccgagtagctgggactacaggtgcctgccgccaagcccagctaattttttgt[169 bp omitted]gactttgaaacttgaggctggg[135 bp omitted]aaattagccgggcgtggtggcaggcgcctgtagtcccagctactccagaggctgaggcaggagaatggcgtgaacctgggaggcagagcttgcagtgggccgagattgcaccactgcactccagcctgggtgacagagcaagactccgtctcaaaaaaaaaaaaaaaaaaaaaatcacccaggcatggtggcatgtgcctgttgtcccaggacctcaggaggctgaggtgggaggattgcttgaacccagggggtcgagactgcgatgagctatgttcaagccacttcactccaacctggttgacagagcaagaccccatctcaaaaaagtcattccttcagtctccttcaaccatcactccagtgaaaatacttttgttgctcaatgctataatcagtttcccggttctcatcgtagctgaccaacagaagcatttggaattgattgctcccttctcatcggtacattttttcactgccttcaaggacatcgtcttattttattttattttatttttgagatggagtttcactcttgtcacccaggctggagtgcgattgtgcaatcttggcccactgtaatctctgctcccaggttcaagcaattatcctgcctca[134 bp omitted]cggcctcccacagtgctgggattacaggcgtgagccaccgtgcccggccacatcatcttattttgattctcctcctactcactggttattccttttcgttttccaccgtgagttccatcacttatttgattttaggcttctgaattttggagtgctctgaaacctaggttgttctctcactcgctgtcgctctaagatgagctcaggactttaaactctcagctccagaaggagttattccaaagagctcgcaaacctgtgggtatgtgtagcaatggattctaagggtt[131 bp omitted]atctccacctcctcggttcaagtgattctcctgcctcagcctcccgagtagctgggattacaggcgcccgccaccacgcccagctaattttttgcatttttagtagggatggggtttca[132 bp omitted]tgagacagagtcttactctgtcacccaggctggagtgcagtggtgtgatcttggctcactgcaacttctgcctcccaggttcaagcgattctcctgcctcagcctccagagtagctgggttacaggtgtgcaccaccactcccagctaatttttgtttttttagtagagacggtgtttctccatgttgtccaggctagtcttgaactcctagcctcaagtgatctgcccacctcggcctcccaaagtactgggactataggcatgcaccaccacgcctagctaatttttgcatttttagtagagacggggttttgccatgttggtcaggctggtctccagctcttgacctcaggtgatccacctgcctcagcctcccaaagtgctgggattgcaggtgtgaaccaccacgcccaacctagtttcttagaaataaacatttaatagggacttaagaacagaagctggaccagggacaatggctcatgcctataatcctagcactttgggaggctaaggccagtggatcacttgagcctaggagtttgaaaacagcctgggcaacatggtgagaccttgtctctacaaaagataaaaaaattagccaggcatggtggcatgcacctgtggtcccaactactcgggaggctgaggtggacgaatcagttgagcccaggaggttgaggctgcagtgagtcatctttgtgccactacactccagcctgggc[221 bp omitted]gaggcagaagaatcgcttgagcctgggaggtggaggttgcagtgagacaagatcgtgccattgcactccagcctgggcgacagaatgagactctataaaaaaaaaaaaaaaaaaaaaagacagcagatccctgcactgttacccccccagacctaaagcttatagaccataaagaaaaggtgattggccgggagcggtggctcacacctgtcaggctggagtgcagtggcgcgcgcgatctcagctcattgcaagttccacctcctgggttcatgccgttctcctgcctcagtctcccgagtagctgggattacaggcgcctgtcaccatacctggctaatgttttgtatttttagtagggacggggtttcactgtgttagccaagatggtctcgatctcctgaactcgtgatccacccgccttggcctcccaaagtgctgggattacaggtgtgagccaccatgcccagcctaaactggaaatcttagggcccttcccagagctggggtgagtcagatgccaacatggcagatgagcatccaagatgaagttgcttttccctctaccagtggtctcagaaaacagatgctagactgagcgcggtggctcacacctgtaatcccagcactttgggaggccaactgcacctgaggtcaggagtttgagaccagcttggccaacatggcgaaacgctgtctctattaaaaatacagaaatcagctaggcatggtggcgggcgcctgtagtcccagctactcgggaggctgaggcaggagaattgctcagacctgggaagcagaggttgcagtgagctgagatcgcgccactgcactccagcctgggtgacagagtaaaactccgtctaaaaaaaaaaaaaaaaagatgctgaagacgggattctgggattaggttattcacctctttgctctttgatgagctgtttaatgatgtgatgatatcctgggaggtggaaaacgggatgacagttattgcatgtagtgccatcattcattatttattatctttggttgtttgcaatgaggttccagtaaacaaatcaaaagccttggctgggtgcggtggctcacgcctgtaatccaagcactttgggaggccaaggtgggcggatcacctgaggttgggagttcgaggccagcctgaccaacatggagaaaccctgtctctactaaaaatacgaaattagccaggcgtggtggcacatgcctgtaatcccagctactcaggaggctgaggcaggagaagcacttgaaccagggaggcagggttgtggtgagccaagatggcgccattgcactccagcctgggcaacaagagagaaattccgtctcaaaaaaacaaaccaacaaacaaacaaaaacaaaaggctttagccaggcatagagggcacacctgtagtcccagccattgggagtctgaagctaggggattacttgagccctggagttcaaggctgcagggagctgtggcattgccctccagcctgtgtgacagaatgaaattctgtctctaaaaaaaaaaccttctgttgttgttgttgttgtttgtttgtttttgagagggggtctcgatctgttgccagcctagagtgcaatggcgtaatctaggctcactgcaacctccgccttccgggttcaaacgattcccctgccgcagcctctctagtagctgggactataggcacgtgccaccacgcctggctaattttttgtatttcagtagagatggggtttca[138 bp omitted]ctgctgaccttgaccaatatagtgggagcgatgagggctgtggaacagaacagctatttctgtcacactgggaagatgacataaagaaaatgatgagctcaggactttaatctcagctccagaaggagatggagatgctgtgtatttccaaagagctcgaaaacctgggtgtatgtgtagcaacagattctaacagtgttggaccagggaggatggaatgtcaagtttgatgggaatgaattaatgtattaattctgaatttaatgtgctagcttgagcagctgtaagtagctctaataataatggaccaaaacttgggttcagtgatggcctacatttaagtaggttaatatcccagaacctccctggtagaatgtcaagaagagaagataaagtggccgggggggtggctcaggcctgtaatcccaccactttgggaggctgaggcaggcggatcagctgagctcaggagtttgagaccagcctggccaacatggcgaaaccctgtctctactaaaaatataaaaattagccgggcatggtggtgcgcatctgtaatcctagctactcaggaggctgaggcaggagaatctcctgaacctggaaggtggaggttgcaggttgcagtgagctgagatcatgccactgcactccagcctgggtgacagagtgagactgtctcaaaaataataaataaataaataaataataaataaaataatctaaaggatttgggaggtagcaactctggaatagacttgttatgtgcaatcatttgtctctcctcctgtatatacccccgggagtacacaggaacattcttttcattgagaaatgaactagggaggagtataaataagtggatggatggatggatggatggatcaatcaatagatccatagagtgctctccattcaacaattgaagcacacacatttttttctcaagcacacttataaaaattgatctgtactaaaccaaaagaaagccccgataaattcaatgaacaggtatcatacagatcaatgtttctgatcactatgcaattagatctctagttaatgtcaaaaagaggaatttaaaatcctcatatatgtggaaatttaaattgttttaatttttgcttttgagacggggtcttgctctgtcacccaggctggagtgcaggggcgcgatcacagctcactgcagccttgaccacccagactcaagccatcctcacacctcagcctccctagtatctgggactataggcacgtgctaccacggtaagctaattttttttttattatttttagcagagacaggggtcactatgatgcacaggctggtcttgaactcccgggctcaagcaatcctcccgcctcggcctcccaaagtgctgggataaggtgtgagccaccacacccggctttccctgcattccaggggacttgtttacagtcttttaactttgaattcttttgttgttttaagtgtgtttctttctgtctttctttgtttttttttgttttgttttgtgtttgagacagagtcccactgtgtcacccaggttggagtgcaacggcgcaacctcggctcacggcaacctctgcctcatgggttcaagcaattctcctgcctcagcctcccaagtagctgagattacaggcatgcgccaccactcccagctaatttttgtatttttagtagagactgggttttaccatgttggccaggttggtcttgaacttctgacatcaggtgaaccgcctgcctcagcctcccaaattgctgggattacaggcatgagccaccgcccccggccagtgtgtttgttataaaacagcattgatctggatttagtgtgtatatgttttaatccatgttgtcaaactttgtcttttaactggtgaagtcttgttaatttacatttaatgattaatataattgacattgtttatcatcttcatgtattatattacttcagtttatctctccctcctcaaaccccaaaatgtgaatataatctagactttaaattcttaactattgaggatatat[356 bp omitted]aacagaaaactttatcaaattattctaaccactttacttcatatgtttcttgcaatatcttctggatttgcatttttttctctttattattttattttattttttgagacagagcctcattcactctgttgcccaggctggagtgcagtggcgtgatcttggctaacggcaacctccacctcccaggttcaagcgattttcctacctcagcctccctagtagctgggattacaggcatactccaacatgcccaggtaagttttgtatttttagtggagacagggtttcaccatgttggctaggctggtctcaaactcctaacctccagtgatctgcctgccttggcctcccaaagtgtcgggattacaggcatgagccactgtgcccggcctattgcctcattttcacctgaagaaattggctattctgccagacacagagggtatttccaggtatattctgtctgttagagagggtatttttactttgaggaactgccaattccctattctgtcttttatggagggaaatatcataactctgtgctttccctctgagctcagaggtgtactggcgggggaggggtattaaatctatgggtgaaaagccctgggtataaaaaaaaacattgtccggctgggcacagtggctcatgcctgtaatccagcactttgggaggccaaggcaggaggatcccttgagtctaggagttccaaacaagcctgggcaacatagtgagacactgtctcaatttttcaatgttttttttttgttgtttgtgttttttgttttttttttttgagacggagtctcactgtcacccagtctggagtacaatggcgcgatctcagctcactgcaacctctgcctcccgggttcaagcgattcttgtgcctcagcctcccgagtagctgggactacaggtgtgtgcctggctaatttttgtatttttaatagagacagggtttcaccatgttggccaggctggcctcaaactgctggtctcaagtgatccactcgcctcagcctcccaaagtgctgggattatgggtgtgagccaccgcctctggtcctggctgacatcttgactctaacttcatgaggatctcagccaggacctaaccccaggagtgaggttaactgattgtatttctgaccttcagaagttgagatacatttgttatcttaagcaactaacttatggggtatttttacacaacaatagacaactaatatagttatctagtaataatcagcctaaaaaatgttgacttgacagacctatactataccacagaaccttgtttctaccaccattgccatctcaaagaactgtaccaccaccagcacctctgtggggaccacgacatcctgtttgctgaaaattaaataaatcacagtgggctgggtgtggtggttcacacctgtaatcctagcactttgggaggccaaggcagacagattgcctgagctcaggagtttgagaccagcctgggcaacatggggaaaccttgtttctactgaaaatacaaaaacttagccaggcatgatggtgtgcgaatgtaatcccagctactcgggaggctgagacaggagaattgcttgaacccaggatgtggaggttgcagtgagccgagatcacacgcacttcagcctggacgacagagtgagaatctgtctcaaaaagaataataaagttaattaattaattaaaataaataaatcacattgggcatagagggagtgcatggtgtgtgtgcaattcactaggactctggtcccaaaaagcagacagaattcatgctagcatgagaggccatttattgttcaggggctgagcccccctgttttgggggggttcctgcactgctgcctccccccattgttcccgtggacccctcaagtggcaggttgctgagatgatcgtggagggagcacatcttcaagtgtagatggtccagagtggccatcttctccctgtcatgaggcagcggggagttgatggcggcatggctaggtgctggggtgttggagtggaaggggagatcaggccctttccccaagatctcaccctcctcccatgccctcagcctccttcctcactctggcttcatcttgtctgtcagcagtaggttcttggcccgcagggcctcgtcttgggccagccgaagggtggagctcagggcctctgccctgacgtgtttggctaaggcctggcgctccagctcctggggagaggagcgtaggcgtagctgggcttgctggactgggctgggggtggagggggaactggattgcggagggcaaagggtagggtcccatggggcccacatttctccctcagagtttcccatcatgccttgagcttgagactgaccccagcatcccacaatgcactggtctccagattccgctgtggactaaatctgtgtctgtcctattgtctgtcccatgatgcactgacctatgtcccagcaagcactaaatcagtgcctatcgtctgtctcctaagctcatgaactatcctacatttgatatgtgtgtgcaccccagtattctaccacatggtgacctcctacattccataatttggaagaccccacatct[135 bp omitted]acagggtgaaaccccatctctactaaaactacaaatattagctgggcgtggtggtgtatgcctgtaatcctggctgctcaggaggctgagacacgagaatcgtttgaacctgggaggtggaggttgcaacgagccaagatggcgccactgcactccagcctggagcaacagagcgagactctgtctccaaaaaaaaaaaggccgggcgcagtggctcacgcctgtaatcccagtactttgggaggctgaggcaggcggatcacgagatcaggagatcgagatcatcctgactaacacggtgaaaccctgtctccactgaaaacacaaaaaattagccaggtatggtggcaggcgcctgtagtcccagctacttgggaggctgagg[139 bp omitted]gttctctacgtacaactgcaccaagccccatttcctctcatgtattagtcctatagctcggccacatcaatgtcccacagtgcctcacttgtctgtctcacccactacaacataatcctatagtacattaggtcaatatcccataatacagtgcactagggctcaagttccaccaactattgggctgagtgtgttgtgcaatgccccaggaagagctgtggttccatttcccataacgcatcagctaactggggcctacagtcactgggtctcctattttacctcaatatagctgaccccaatgatcttgtacaatgcaccgcctctctaaaagtttagagaaaatcaggcctatgttccatgaagctttagactggtgtctgtctcgtgtcccacaatgcactagatccaacgtcctatcatgctttaggcccaagtccatcttccgaggtagcgtaatgattggcctgtgactcactcaccaccaaactgcttgtccatctccccatgcattagggccaagtcctcccccagtgcctgctgctcccagctcagcccttccccttctgccacacaccagcagtacccttgagtccggggttcccctccccttgccccaacagaaaagtaaagtgggacatggtggcccatattccctggtaccagaatcttcttgtgtagcctctgacagctgggacaggcaggagtcaggcccctctgcttcacctcgtccactagtgaggtcagtgctcggtccagcagctgctgcagggactccgtagacaactgcgacccctggctgggggaggggcggtcaccagataaagaggcccagtaccaactccaggacgccccatgccccatgctcacctgtggagcctccatttggcctcgtttccagtatgcaccctatgcaaccttcccagcatgcactgtgcaccagctgtcccttggtttccatggtgctctggggatcactactccttttttttttgagacggagtctggctctgttacccaggctggagtgcagtggcgcaatcttggctcactgcaaccttcacctaccgggttcaaacaattctcctgcgtc[211 bp omitted]tctcgctctgtcacccaggctggagtgcagtggcaccatcttggctcactgcaacctctgcctcctgagttcagcgattctcctgcctcagcctcctgagtagcaggtattacaggcacccgccagcacgcctagctaatttttgtgtttttagtagatatggggtttcaccatgttggccaggccggtcttaaactcctgacctccggtgatcctcccacttggcctcccaaagtgctgggattacaggcgtaagccaccacgcccagccagagtcactattcctaagggcaccagacagccctcagtttgcaaaggccgtcaagaactaacatttcccataatacactagtgaaactcgatttcatgttgtactgtgagtccccctttcctacaatggaccttcccacaatgggccaaaaatggtgtatccctcggctctcacaatacaccaaggtctcacttccccctcagtgcactgaaaccctgcctctcctcatgttcacatcccagccttcccacaatgcactggaaatatgatgcttaaaatgtactaagtgtttttttttttttgagatggagtcttgctgtcgcccaggctggagtgaaatggcacgatcttggctcactgcaccctccacttcccaggttcaagagattctttggcctcagcctcccaagtagctgggattacaggtgctcaccaccacacccagctaatttttgtatttttagtagagatggggtctcaccatgttggccaggctggtctcaaactcccgacctcagtgatctgcccgtcttggcctcccaaagtgctgggataacaggtgtgagccactgcgtccaccctttttattttatttttattttattgagacacagtttcactctacctactaggctggagtgcagtagcgtgatctcggctcactgcaacctccgcctcccgggtccaagtgaatttcttttttttttttttttttttttgagatggagtctcactctgtctcccaggctggagtgcagtggcatgatctcagctcactgcaagctccacctcccggatttacgccattctcctgcctcagccttcctagtagctgggactacaggcacccgccaccacgcccagctaatttttttttgtatttttagtagagacggtgtttcaccatgttagccaggatgctcttgatctcctgaccttgtgatctgcctgccttggcctcccaaagtgctgggattacaggcatgagccaccgcgcccagcctggtccaagtgaatttcatgccccaacttcctgagtagctgggattacaggcacgcgccaccacgcccagctaatttttgtatttttagtagatacggggtttcaccacgttggccaggctagtctcgaactcctgacaccaagtgatccgcccaccttggtctcccgaagtgctgggattacaggcgagagccaccgcgcccggcctgtaccaagtttctcttgagttccacaagacactgattctaccttgtagagtgggaacaaatgaggcttctagtgcagcaggaccggctgtttctacaatgcactgggataccttgtctcccaaaatgaacagcgccccacccttcactaatgtcccatctccttccgcatctcctttaatgtcctatccacaaggctcccagaggcaagcccagccccgttacctggcacagcgggcacagttgccttggtgggaccgatccaggttcatggagaggtcaggccctcttcgagagttctgaaattgccgcccgaactcctccagaatgggtttcagtgggcccagcccctccagttcgctcctcagtgaagccacagacactgctgaccgctccaccctgaggcatgagtaaccagtgctgctgggtcgtctcttcagcggtataaccctggcaagactccacccattattagcccaccacttgcgtctccatctggtcagcaattctccaccctgccctcccctctctgctctgactggcctcactttttgtattttactttatgttatgttatttatctgttgactattttgagccagggtctggctctgtggcccaggctggagtgcagcagcaccatcatagctctctgaagctttgaactcctgggctcaagcgatcactcctgcctcagcctcccgagtggctaggactaccagggtgcgacaccacaccactcccagctaatttttaaattgtttgtagagatggggtctccgctatgtggcccaggcttgtcttgcactcctggcctcaagtaatccgcccacgtcggcctcccaatgtgctgggattatagatgtgagccacctcactgggccaccttttgtagattactgtttggaatgcccctcctagttctcttaattgattttctcggatcccacttgaccccaccctttgcccttttaaggtatagaccacaccccttctctaattgattccacccctcaggccttattagggctgatgcaacccttcctgctctctaattggtgtttcccgatgtcggtatatgttccggaatgcctggccatagctgattggcctacccatttccctcaagaccccgccctcaggttgggattgccctgccccttccggtcttcccatgcactggccccaatcctcacatggtgcacagctcatccgcccgacctcgcagctcctgcaagtcccgcgccgtctgtgcctgttcgcgctgtgcccgctcccactggcctaggaagccgtcgaccctgccgcccaggcccccgagcagccgcagggcttcctgcaccgccccctcctcctgatgccaccgggcggtcagtgaggacacctctctcctggaggggcagaggaggggaatgggtaggggctaggcttcaacaggtccccacctacccccacgagataggtgggacaggactcacctatctcgccccactgagaccatgcccgtggctccagacccacccaggtcaccaaattttattgcaccctccatttggtgaaatttggtcgtgtcctccagagccccgcctttatccccttcctttattggctatcttggccctttcctggtcaggtccccaacctctacctgggctcctccagacactggccccccaaggcactgcccaccctactctgccccacgtggtgcctccaggaccactcctctcctaagccccgcccacctcagtttcaccaggcctggacctgcctcccagcagcccagaactaaaaagttccttattctgtccctcccttgctcaggtcactgccttcggggcactccctcctctgctcttggagaccccagccttgtcgccttccggttaagatctaggccgggcgcggtggctcacgcctgtaatcctagcactttgggaggcc[135 bp omitted]aagcaggagaatggcgtgaacccgggaggcggagcttgcagtgagccaagacggcgccactgcactccagcctgggcgacaagcgagactccgcctcaaaaaaaacaaaacaaaacaaaaaacgatctttgaggaacctcccctgtgtccccgcccaccgcagctcctggagactcctcccgtgtctctacccaccttcgttcctcgaggctcctcccatgttcccgcccacctcaggtccccgaggctccacccatgtcaccgcccacctcagctacttgagaacccccgtcccttgggtcccgcccaccgcatctcctcgaggctccacccctgagtccccgccgatctcgttttcgaggctccgcccctaggtcccgcccacctcagctcttcgatgccggtgaacagcttctgcaattcctgctcgctcacgtaggggccctcgccagcccgaggccccattccccagcctgcggggaccaggccgtgtggccgcgagggtttgtcgggactccctggcgggccggggcagccctgggacgtggcggcggggcccaggctgttccaggagaggccagcctccggcttctgcttctcctccggctcctgcttctcctccggctcctgcttctcctccggctcctgcagctcggcctcctgccgtcgcggcgtctcatcctgcagctgctgctggaggtagcgcagcttctcctgggtggtaagggaggacggggtcacagcgtccagccgctttcctcccgcaaccacctccaccccaaaatccgctccagtactccccgagattggaagtagaacgcctgtggggacagtatgttggaagtctcactggctgtcattagggaggggaggcaccatttgaggcccagttggactccaattcccgctaacctcccacagcctgcctccaggtatccacccggccctccaagccctccaggcgtcaaataccagtcccggccacttggcaagaacaactgaagctttctcagcattttgttggaaaatgagtgggcatgtggacaggacgggccttctcacctgaagtccagctcgattctctttctgggacctgaatgtgactgcagggcaagagtcccccatctgggtgttggagcctcatttgaatccctcttatcagcgagttctaaggatgactatgtgcacgaaggtgcagtgtggtggtggtgtcggggcagggagttccacctaaaagtgtatcttgagtccctcgtgcatctgacctcctcccacaaatcctgggactgccccctagcccttacctccagcagggcagaattctgcttcaagacgttggttttgatttcagcatcttccacagaccgggtcaccttccagcagttctcctgggtcagacaccagggcgagggccctgccttcccattccagttctgcctcccaacccttagcctgtctgtttccatccaggctccaggcctcctagccccccagtacaagacacactcaccagctcatttccttggctaaggggatggcttcctccttagccagatgtgccagagtggcacccctccacttcctcccacctctcttcggtccacccattccatttctcctctttcttttctttttttcttttgagactgagtctcgctctgtcggccaggctggagtgcagtggcgcaatcttggctcactgcaacttccacctcgtggattcaagcaattcttctgcctcagcctcccaagtagctgagattacaggcgcccgccaccacacctggctaatttttgtatttttagtagagatggggtttc[131 bp omitted]tactcccattcccctctccccatccattcctgcgtcccactggctcaccttgagttgaatgcagtacccctccaactcttctgcctcttgccgccttctctccagattctcgctcagcacagaacactcgctctggagcatggaaggaggagaggttagccaaggacacgaggggacagcctgtggaaaagaagatctgggcctgggaaggttccttttctttctgagcctcaagctccccaactgagctatgggtgcattctgctggaggcaggctccaagaagggaacttggccctggaggaagggcaggtgttggatatagggggtcctcacacctgcagagactgcacgtgctggttaacccggttggtcttttccttcaagctggtgatggagtctttggcgcggaccaatccactgttgaccccactctggggaagaatgggagacaggtgagttagtgggtatgtgggggcaagccccaagcccaggaagaattccagaactgggaggctgtgtttacaccttgattttgccctggaatggctatgtgacttggagccaagggctatacctctgattcttagcattcctgcgcggcaaacccagggcataaacgacctttcttcatggtgggctgggagaaaaataggatccaggagggaaagggggatggaggtggggtgctcagacatgtggaggaagaaggatggactcaaccaaacactgagctaaatgtccttgggggccaggtgccgtggctcactctggtaatcccagcactttgggaggccgaggtgggtggatcacttgaggtcaggagttcaagaccaacttggccaacatggtgaaaccccaactctactaaaaatacaaaaattagctaggcgtggtggtgcctttaatcccagctacttgggaggctgaggcaggagaattgcttgaacctgggaagcaggggctgcagtgagctgagattgcaccaccgtactccaatctgggcgacagagcgagtctccgtctaaagaaaaaaaaaagtccttggggtccacagcttaaaaagagaaactttgaaaacacatgccctttctctccaggaactggtgaattacaaaggaagccacttttcagatatgaacacttgctatgcaccaagcacttgtcttgtcttttattcttcacaactccgcctcttgaggttatttggcctattttacaagtgagacaaatgggtctcagaaatgggatatcccttgtcttcccaagcactcagcacattaggtgatctcatcagaatctagattcagaacgcttgttttaaaccatgacaccatgtggcctctggtcatcattactttatatcacataaagtgttgtgcgactcctgccaatccgtggttcaggagggatgcatgtggtaggatccattctcccagcttggacagttacagaagccttagcctggcacatgactgcccaaccagagactacatttcccaggtttccttgcagctaggtgtggccatgtgactaagttctggccaatggaatgtgagtggaaataatgtagtcaatttatttttgggggaggtgtgtgtgtgtggggggtctctcattattaccctggctggtgtggagcggtactatcatagctcaccagctcctgggctgaaatgatcctcttgcctcagcctcccaagttgctaagagtataggtgcttgctaccatgcccagcaaaattttaagatgtttggtatagatgggttctcactacgttacccaagctggcctcaaactcctgggctcaagtgatccttttgtgtctgcctgtaagtgttggtcttacaagcatgagccactgtgcccagcctccttttttctctctcttttatttatttttttttttagcctacatcattacttagactgtgcagaattatagtcaatttctgagtcatcccttataggaaaagagtgagaactttccctttttctctcatttcactggaatgcacaattgagggctgtcttggaccagcagatagaggacacaatgaaacagaagaagcctgaatccttgacatggagccaccatactccattccaaccacctgtgaagactttcagggtgagacattacatcttctgtgttattcaagctgtgttattttgtgtttttttgttacagtagtcaaatgtataacttcaatatcattgacattctttttttttttttttttgacagagtcttgctcttttgtcaggctggagtgcagtggcatgatctcggctcactgcaacctctcactcccaggttcaagccattctcctgcttcagcctcccgaatagctgggactacgggcgtgcaccaccacaccaggctaattttttgtattttagtagagacagggttt[134 bp omitted]aaaagagacccagagagccctctgccagctgtttatgaccagttccagccgatggaagggaagtgggcactggtcgatgtgtggaaaagacaggcatgatctcttcccctgttccccctgcttaatggctggaaggcagtggcgagagcaactgtctagaaatggctgagcaaccagaacgtagacacctgtaacctgctgcatttgaagagcagagctactaagcttatcaagcattttatgtgcaaaaaagcagttctcttggtttctctcatggttgctgaactaatacacaaaagatagacagaataagtttcctcccttgtgagatggaggcagcaacacatttcttgcatgattgctctggggaagaagtggaataagaaatattgtatccagttaac[131 bp omitted]tggagccccgtctctactaaaaatacaaaaattagccaggcgtggtggcaggcagttgtaatcccagctacttgggaggctgacacaggagaatcgcttgaatccaggaggcggaggttgcagagagcctagatggcgccattgcactccagcctgggcgacaacgagattccatctcaaaaaaaaaaaaaaaaaaaaaaaggaattcaaaaattccacccctccataaaaacaatgaaaaaactaacaaaaaccataagaagcagtttgttcacaattctggaaattaaccaaaggcttgcagcaactcaaagagcatttattcaagaaaagtgactctcgataaaaaacggcaagacttgaggaattttaacttatcctagtcctatctcccactccctagctcagcaggaaccctggaaaataacagcccacatttcccacagggaggaagcagaatgaagctagaactcattcaaagcctcataacccaaagaagagtcattctatgattgttaagtgatgcctgggaagaccccacacagaatatttgtctttccttttcagaactggcaaagccgtgaaagcatctctgatagttgaaggaaagatttggatgtttgtcctctccaaatctcatgttaaaatgtcatcccttgccaggcacagtggctcacacctgtaatcccagcactttgggaggctgaggcaggaggttcacttgagctcaggagtttgagagcagcctggacaacatggtgagaccccaactctacaaaaaaaaaaaaaaaaaaaaaaaaagtagccaggtgtggtggtgtgcacctgtagtcccagctcctcaggaggctgaggttgaagaatcgcttgaacctgggaggtggatgttgcagtgagccgagattgcgccactgcactccagtctggatgacactgagatcctgtctcaaaaacaacaacaaaaaaatgtaactcccaggctgagcgtggtggttcacacctgtaatcccagcactctgggaggccaaggtgggcagatcacctgaggtcaggaattcaagactagcctggccaacatggcgaaagcccgactctactgaaaatacaaaaattcgccaggaatagtgatgcatgcctgtagtcccagctacttgggaggctgaggcaggagaatcgcttgaacccgggaggtggaggtcgcagtgaaccgagatcatgccactgctctccagcctgggcaacagagcaaaactccatctcaaaaaaaaaaaaaaaaaaaacttgtgtggcatctccttgctcctgctcttgccaggtgatatgctggctccatcaccttttgctatgaggccctcaccaaaagctgagcagatgttggcaccatgtttatcagatagcctgtgaaccataagccagttaaacctcttttatttatacccagccttgagtattcctttatagcaatgcaagaatggactaacatggagtgggagagggaacatttgtaaagaaaaaaaaattttacgcttgttttaatgttgctactgccgaaggcaatggataacagttggggtaaacaataaaaagcaaaaaatcttaaaaggaaaatctgatggacatatctgtagaagccttgaaatgttccaacaaattcctgggaatgtagaaagccattggcctgtgtagggttgtgtacatgcttgggaaagttctgagaaggccccaagcttttcacctctggctgaccttgaaaccttgaaacgctgcacaagcaggaagggaaggctaaggtagagttgtaaattgtctgagtgttaaaggtgtgcctcatcaggcacacagagtgccatttggcaaagactagaagattttgttgttgttccagtttaaggaaatgtctctccaatcattagctaaccactaaaattagagaacagagacttcagtggccaaacatgacaaagaacacagatattacagaaatagttcagaaaagtctgttttttaaaaagcaactacaggccaggtgcagtagctcacacctgtaattccaacaatttgggaggatgaggtgggaggactgcttgagcccagaagttcaagaccagcctgagcaacatagtaaaa[175 bp omitted]gtggcgggcgcctgtagtcccagctactcgggaagctgaggcaggagaatggtgtgaacccgggaggcggagcttgcagtgagccgagatcgcgccattgcactccagcctgggcaacaaagcaagactccatctcaataataataataataataataataataataataaaataaaattagctgagcttggtagtgcacacctgtagtcccagctactcagaaggctgaggcaggaggatcccttaagcctgggagttagaggctgcagtgggccacaatcatgccactgtacagtggcctgggcaacagagcaagatcatgtctcaaataataataaaaataaataaataaaaataataaaataaaaagcaactataacaagcaataataacaacaaatccttatgagtggggagaatctgtttctagggttgctacattatgatactttattttttattgtattttttttttttgagacagagtctccctctgtcccccaggctggagtgcagtggcatgatctcggctcactgcaacctctgcctcctgggttcaagcgattcccctgcctcagcctccccagtagctgggactacaggcacccgccaccacgcctggctaatttttgtatttttagtagagatgggggtttcaccatattggtcaggctggtctcgaactcctgacctcaggtgatctgcctgacttggcctcccaaagtgctgagattacaggcgtgagccaccgttccctgctacattatgatactttaaatggccagttttcaggccaggcacggtggctcacacctgtaatctcagcactttgggaggccaaggcaggtggatcacctgaggtcaggagtttgagaccagcccagccaacatggttaaaccccgtctctgctaaaaatccaaaaattagacaggcatggtggtgcacacctgtaatcccagctactggggaggctgagtcaggaaaatcgcttgaacctgggagtcagaggttgcagtgagccaagatcatgccgctgcactcaagcccgggtgatagagtgagactccatctcaaaaaaaataaaaaataaaaaatggccagttttcaacaaaaaagttataaggcatgcaaagaaaaaaaactatggcctatacaatggaggacaaacaagcagtcaagagaaactgttcaggggtaggatggcgggggcagatttggacttactaggcaaacactttaaatcagctactttaaatatgttcgaagtgctaaaggaaaccattcctaaataactaaaggaaattgagagaataatgtctcaccaaatagggcatatcactaaagagacaaacattattaaaagaaaccaaatagaaattatagggttgaagggccaggcgcaatggctcacacctgtaatcccagcactttgggaggcc[133 bp omitted]aggcagcagaatcgcttgaacccaggaggcagaggttgcaatgagctgagatcacactactgcactccagcctggcaacagagagagactccgtctcaaaaaagaaattctagggttgaaaagtacaataaccaaagtgaaaaatgtactagagggggctctgtagcagaataatgattcagtgaacttgaacatagctcaactttgattatccagcctgagaaacatgaaaacaaaaagaatgaagaagaatgaatacagcctcagagacctatggatctgggagtcccagaaggaaagaaaggggcagaaagaatatttgaagaaataatggttgaaaacttccaaaacttgatgatttgaacataaatccacacatccaagaagccaaatgaactccaaataggctccaggggccgggccaagtgactcactgctgtcatcccaggactttgggaggctgaggagggtgtattacttgagaccaagagctcaagaccagcctggccaacatagcaaaaccctgtctcataaaaaacaacaataagaaggctggacatggtggctcacacctgtatttccagcactttgggaggccaagatgggaggatcgcttgagcccaggagtttgagaccagcctgggcaacaaagtaacacctgcgtctctaaaaataaaaatgaaaataaaaacacttttaaaataggataaaatgggccaggtggctgggcttggtggctgatgcctgtaatcccagcactttgggaggccaaagtgggtggattatgaggttaggagtttgaaaccagcctggccaagatggtgaaaccctgtctctactaaaaatgcaaaaattagcctggcgcggtggtaggcacctgtagtcccagctacttgggaggctgaggcaggagaatcgcttgaacctgggaggcggaggttgcagtgagccgagatcgtgccattgcattctagtgtgggcgacagagcgagactccatctcaaaaaaaaagaaaagaaagaaagaaaaccacagaccaatatcctttatgaatatggtcacaaaaatcatcaacgaaatactagcaaaccaaatccaacagcatgtaaaaaggattatacatggtgaccaactgggaattatcccaggaatgcaaggttggttcaacatactaaaatcaaccaatgactgggcatggtggctcatcccagcaatttgagaagctgagacaggaggatcacctgaggccagaaattctagaccagccaggtcaacatagtgagactccatctctaccaaaaaatttaaaaattatctgggtacagtggcatgtgcttgtggtctcagctccttgggatgctgaggtgggaggactgtttgagcccaggaggttgaggctgcagtgagctatgatggcaccattgcactccaacctgggcaatggagcaagactctgtctctaaaaacaaataaatgttacataccatattaatagaataaaagggaaaaaaaacacatgatcatgtcagttgagaaaaagcttttgacaaaataccactcatgattaaaaaaaaaaaaacactccacaaactagaaatagaaaggaagaaaggaacttcctcatcccaataaagggcagctacaaaaatcccacaaaatgtgatagtttaaaatatgtccataaattctttcacattcctttaaaacgtggagccttatttgcctcacttgagtatgagctggacttggtgactcacacccaggaaatagaataaggcaggctagttgtggtggctcatgcttgtaatcccagcactttgggaggccgaggcaggtggatcacctgaggtcaggagttcaggaccagcctggccaacatggtgaaaccctgtttctacaaaaaatacaaaaattagctgggcatggtggtgcacacctgtaatgccagctactcaggaggctaaggcaagacaattgcttgaacctgagaggcacaggctgcagtaagccgagattgcgccactgcactccagcctaggtgacagagactctgtctcaaaaaataaaaaaatagaataaagtagaattgatgatatgtgaggtaagagactacttcataagaggaactgtttcttatttgctctctcttcatctagggaacgatagcctcaatgtcataagcagccacctatgaagaggcccatgtagcaaggaattgaggcctccagccaagggcaggtgagtgccccattttggtagcacaacctctggccccagtccaaccttcaggtgactgcagccccagccaaaatcttgtttgcaacctcgtgagacgccctgagccaggcccacccagctgagcccctccaagtttgttgtttgaagttttggtgtaattggtttcacagcaatagaaagcattacacaaagtgtctttctaacctgaagactcagaaggtcttgggtttcctgtgggtaattgttctggaaaccaaggcaacaggacctagggccaactaatttctcccagttactagccgtatgacctcatggagaggacttcacctctctgtgcctctgcttccctacctgtgaaatggagatataactaacaactaccttcacagggttcccattgtccttcctcctacctggaaactgacactctctcaaccagggtctccatcaccgcctggttctctgtccccctctttccagttctctgtccccacccagcccctgtgtctgttccttctctctctgggtctctatccccctcctctatttctggtcttctgtctcaccctgattcagctctgtcccccaaatctcagagtctctgacttatttttcctgagtctctgcctttctactctttaggtctctgtcttctttttttttttttttttttgagatagagtctcactctgtcaccaggctggagtgcagtggcacgatctcggctctctgcaacctccacctcccgagttcaagcgattctcctgcctcagcctcccgagtagctgggattacaggcatgtgcccccctctgtctctgggtctctgtcctcctctctctctgggtctctgtcctcctctctcttggtctctgtcccccactctctgggtctctgtccccctctccctggtctcccttcccctctctctgggtctctgttcccctctctctctctgggtctctgtctccctctctctctgggtctctgtgtccttctctctgcctgtccccgccttctctctggatgcagctcaggtgctgggtgctggttccagctcctgctgcccccctcacctctccagcaggcaccccaaggtcattactttttccatttcacagagaaggaacttgaagcccgttagaggccgacactcccctgcagccccacagcgagctggcagctgtgtcagaccttgatcctggctgcctggggtactttctcaggcttcacgatccagtgggggatgtgactcagaaatagctctggtgggaggcaaacggctgcaagtgctgcctgagggacactccccaagacagggcggagagctcttctgtctgagggaggagatgtctcccagacatccttcccagcccagactctttgccctgttctctgcagctcctcctccttccctggaccctcgcccaggctcccctctggcctccctgcctcagtctctcccctccaaacatcccccactcagcccaagggagtcttggggagagaaagcccttttgcattagtgacaaaagcagcagccttcttgtcttggtcctgcttcttacaacccctccaaccttgaccttgtggaggttactacaccactgtctaccttagttgtttcttttttttttttgagacggagttttgctcttgttgcccaggctggagtgcaatggcacgatttcggttcactgcaacctctgcctcccaggttcaagcgattcttctgcctcagcctcccacatagctgggattacaggcatgtgccaccacgtccggctaattgtatatttttagtagagatggggtttctccatgttgatcagcctggtctggaattaccgacctcaggtgatctgcctgcctcagcctcccaaagtgctgggattacaggcatgagccacgaagcccggcctcaaatatttttttaaaaaattagctgggtgaagccgggagcggtggctcatgcctgtaatcccagcagtttgggaggc[134 bp omitted]gaggcagaagaatggcttgaacctgggaggtggaggttgcagtgagctgagatcacaccactgcactgcagcctggcaacagagcgagactccatttccaaaaaaaaaaaaaaaaaattacctgggtgtgtggcatgtgcctgtagttacagctactcgggaggctgaggtgggaggatcacctgggcctggggaggccaaggctacagtgagccaagattgtgcctggactgtcatgctgtcactccagcctgggcaacagaacaagacccagtctcaaaaaaaaaaaaaaaccgaaagaaagaaaaaaatttgtttagctgggcacggtggtgtacacctgcagtcccagctacttgggaggtcaaggtggaaagatcgcttaagcccaagggtttgaggttgcagtgagctattatcatgccagtgcactccagcctgggcaatagagtgagaccctgtctcaaaaaaataaaataaaataaaaagaaagaaaaagagaggccaggtgcggtggttcatgcccgtaatcctagcactttgggaggctgaggtgggcggtcatctgaggtcaggagttcgagaccagcctggccaacatggtgaaaccccatctctactaaaaatacaaaaattagtcaggtgtggtggcgctcttgtaatcccagctacttggaaggctgaggtgggagaatcacttgaacccaagaggtggagtttgcagtgagccaagatcgcaccactgtactccagcctggctacagagtgagactccatctcaaaaaataaagaaaggaaaagagatatttgttaaaaagaataaatgtggctgggcatggtgttgcactcctgtaatcccagcactttgggaggctgaggcccaaaaattgcttgagtttaagaccagattgcacaacattgtgagaccctgtctctacaaaaattattattattgttattattttttttttgacagactctcgctgtgtcgcccaggctggagtgcagtggcgtgatctcggctcactgcaacctccgcctcccgggttcaagcaattctcctgcctcagcctccacagtagct[200 bp omitted]caggtgtgtgcctgtggtcccagctactcagaaggctgagatgggaggatcctttgaacccaggagttcgaggctgcagtgagttgtgattgtgccactgcactccagcctgggagacagagcaagaccctgccttaaaaataaataaacaaaagctgggcgtggtggctcacgcctgtaatctcagcactttgggaggccgaggtgggcagatcacctgaggtccggagttcgagaccagcctgaccaacatggagaaaccctgtttctactaaaaatacaaaattagctgggtgtggtggcacatgcctgtagtcccagctactcgggaggctgaggcaggagaatggcttgaacccggccgggaagcagaggttgctgtgagccaagatcacgccattgcactccagcctgggcaacaagagcgaaactctgtctcaataaataaataaataaataaaatttaaaaataaaggaacgaatgtatgcatctccgttttacagatgaggaaaccagggctccctgaacatagaaagtgctagtgaatcttatcagcatcattaagatcatggctattgttaatgtggttctcagtatctggtagagcctgttttaggcctggcccaggggaagccaggtggggggtgaggatcagaggtgcagtgagttaaaggacccatttgtaaccctctatacttttgccagaaattccctaagtccccctaaatcttgctcatctctcagttttgccccagattcttagctgactcccctcagagaactcctactcactcactaaggtccagttgcaagacatcctcctccaggaagctttccctggtaccccccagcctggcttgaggggcctttctctgggatctcctccgttagggaatttctcaccctagtctgtgtcttttgcccccaccagactgggagctccccaagcacagggatctggcctgtttcctgagcccagcctcactggggacatttgggagtgactgtgtgaactgaagaccacccaggccaggcacgggggctctcgcctgtaatcccagcactgtgggaggccgaggtgggaggatcacttgagcccaggagtttgagaccatcttgggcaacacagtgagactgtctctaaaggaagaaaaaaaaaagaccaactcccagattcatggctggctgtcagagaaggaggaggcagttcccagttagttcctctgggtctcgaatgaccagaacattctaactccaagtcaaaaacaccccacccccgtcctaagtatttgctaccaccttgtggaggacctcggtcctccccagcgggtggtgtggagggccctcaccaggatttccgtgatgtctgcgtcatccggatcccagggtagggtaggggaggcagggggcccagccagtgtgagttggccgctgaggtcttccactgtggagtctgtccccgtggagtcagtgggctccatggcggccaggttgagcagtgacacgttggtgcaggccgaggaccgtttgaggttcaggcaccagtgcatgggctgatgggacatctggggctccaccctgcagagaagaaacaggcagaaaagtggagaagcagccccagggtgtctgggccctcctgccttcctttctccatacctcaccccctgtgactccaccctcactgtatataagtttctcccttctctgtccccgctgcctactttattctccttccctgtgctgcctactttctttcttttttctttctttcttttttttttttttttgagacagagtctcactctgttgcccaggctggagtgcagtggcgcgatctcagctcactgcaacctccgactgcgggtcccagttcaagcaattctcctgcctcagcctcctgagtagctggggttataggcatgtgccatcacgcccagctaattttagtatttttagtagagatggcttt[144 bp omitted]ttctcctcccttctctgccacctactttcttcttcattcactagcctcccttctccttcttccctccccactggctttttcctctctccatccatccccattaccttcttcctccctccatccatccccattaccttcttcctctctacctccctgtgacttgatgtctcttcactgctgccctctttcctgcccccgacctgctggcttttccccctccccttcctctagcacccacagtcggactcctgctctgttggaggtagtgctgggcattagaaccatccctgacagtgtgcaacaaacccacccgtggaacgacacggccttctttttcttcgggatccccttggcccggctggtcaccctccggggagcctctgggactagctgggagcagctctccacccccgtgggggtgtccccggcctcatggatctctttggactgccagatcgtcttcaccaccacgctcgccatggtgtgggggtctggctcccagggaggggctccttcctctgagacttcctacctactgtgaccacagaccctcaggatccactgtcccctcagcctgcctcacaaaggacccaaccactgggccccagtgagtggggggcacagggtagggagagatgctggcccaggtcattcccctagggttctcagtggactcctcctgttcaggattctagttacatgcccaatgtgccccccgtcttcagagctccagtggatggattcatgctagcctgtaacttaacaatgggtcggcccacggattcttgggagaggtccaacttccctctccctgagactaagcgtggggtcacacagccctgtgcacttgttcttgattcttcatgtagcttcctggatttgacaattggctggggtttgagagactgtggtcgaagagggctgagatccagaccctgacctggagggtctcatattctatggggcgtcggggtcgggggaaaggcaatatacaggtagatcaacaaaagaaagctaggtgcggtgggcctcggggtcagggtagaaggtgagggaggagaggaaggtagagagttggggcaggacagagggtggtatccccctcccccgtttatttatttattattttctttaatactttttattttttttgagacagagtctctctctgtcatggaggctggagttcagtggcgcgatctcagctcattgcaacctccacctcccggggttcaaccgattctcctgcctcagcctccccagtagctgggactacaggcgctggccacaatgtccggctaatttttgtatttttagtagagacgggtttcaccatgttggccaagttggtctcaaactcccgacctcaaatggtccacccgccttagcctcccaaagtgtgggattacagacatgagccaccatgctccgctataattttttttttttttttttagatggagtctcgctctgacacccaggctggagtgcagtggcgtgatcttggctcattgcaacctctacctcccagtttcaagcgattctcctgcctcagcctcctgagtagctgggactacaggtacctgccaccacacccatctaattttttttttgtatttttagtagagacagggtttcactgtgttggctaggctagtctccaactcctgacctcgtgatctgcccacttcagcctcccaaagcattggaattacaggtgtgagccactgcgccccgcccgcccaaagtatttaaaaaatatatggaacatgtcacaaatttgcatgtggtctttgcgcagggcccatgctaatcttctctgtatcgttccaatgttaatacatgtgctgtcgaagcgagcactgccctgctatttagggacagacttttcctgttctcttcacacttctcaaaaagactagttcaaacatcactgctaatagacattttaaatgctgttatccccagggagaaagtacttcttcctggtcatgaatggactccagttcttggaac[135 bp omitted]acactgtctctacaaaaatacaaaaattaggcgagcatgatgacgggtgcctgtaatcccagctacttaggaggctgaggcaggaaaatcgctttaactcgggaggaagaggttacagtgagccgagattgagtcactgaactccagcctgggggacagagagagactctgtctcaaaaaaaagaaaaaaaaaaaaggccgggcgcagtggctcacgcctgtaattccagcactttgggaggccgaggtgggcggatcacaaggtcaggagatcgagaccatcctggctaacacggtgaaaccccgtctctactaaaaacacaaaaaattagccaggcatggtggcgtgcgcctgtagtcccagctacttgggaggctgaggcaggagaatggcgtgaacccgggaggcggaggttgcagtgagctgagatcgcgccactgcaccccagcctgggcgacagagcgagactccatctcaaaaaaaaaaaaaaagaacttcaagtcctgggattaataatttttcttgtgtttaatggggctgctttatgttcttcaggggcaaacagcacccccctcccatattagaaatggactctccctgtgactaaaacagctgagcaatttctgtcctcctggaatccaaaatggactttcccaggccccattcctggaaacccaaatggacgcatccattgagcctggaaggtgggctcttctcaacctcctttccatctcccaggattcagaatggccattccaaaggtccagaacacacccccaaggctcattccaggaattcttggcttctgagattagaaaaggctgatggggtggagttttgttcctacaggtgacagaaatggactcttccagttccctttgtcccaaatttctcaatctcctggggcgttgggagttctggccgttttgccttccccaaagccagtttaccaaagagtctctggggagctgggggttggggatggaggctggggctgggccaaagcagattcacctatttcttcttttaacaaatgttgttgaaactgttcaaggccaggtcccattcttgcccagaaggagttcccagtctggaggagacaatcaattttggtttgatatctgctacaatggaggctgcccgagagacactgcggttggacaaaaaaaaaaaggcaacatatattgaaaagtaagccaagatacggtttacgtttatttctgctttttcacttccaagctgtgtggccctgggcaagtcattcgccctctcgacctaagttttaacttctgcttaatgggactagccttgaattactgtttttcactctgagattctaggtctcctgacaactcaagtcccgacacgttggctgcagagaaggggggaggggaggaaggcttcctagaagaggatttcagcagtcgggggtgacagtggagggagaaagggaacacggagacgcttgcgcagtaaacaccgcacgctctcttgcctcgcccaaccccttctctgcagcagggaattgcaggcgtcgctccacctatcccagccgagcggagtgacaccctcccctctttccttctctactgatcttcgccttccgcccgccccacagccgcccaatggagggctgaagtaggacagatctcgccaatccgcgacgcctgcggggcaggtctacccgttcattggtcccagtcaacctaagtcccgcctcctaggaccgttccccgccttccttcacgtccctcccttcctccttggagagccgctagatccaatcagtgtttgacctggccgcgcggagggggcgggcccatgatacgcaatcgaaccccgcccgtctctcgggcaacgcctcctcccccccctccccagctcccaaacggaaatagcggaacactgggccaatcgtagcgtcgtgcctttgcttggcggccaatgagagaggaagtgggggagaaacccgcctgtgagcggcaggagctcaagccagtgggcggctcagagctccggaccgcgggcggaggggaggggcagggggcggtgccacggcctgccagcccgcccgcccgcccgccagccagccctccccgcggccggctcggctccttggcgctgcctggggtcctttccgcccggtccccgcttgccagcccccgctgctctgtgccctgtccggccaggcctggagccgacaccaccgccatcatgccggccgtgtccaagggcgatgggatgcgggggctcgcggtgttcatctccgacatccggaactgtgagcgcgcggccgggggacactggagacgcgggggaggggggagcgtgaaattgaggggtttggggatcacagagggacccgggggatcaaaagcctctgcggccgtatagggacagcatagatgggccccaggaagaactttagagtggggggcacgtaggggcttggggtgtcatagagtgcctcttgaggtgacgacacggagtagctagaggggtccgggagggcttgaaaggggaggaagccagtgaggtcccggggatgggagcatagaggtgtcccctgggaaagactgaaaagctgggggatcttacaaacgatggggttagagggattcccaatgtagagaagaagtgaaagaagtgtatggcgggggtgccctgtggagcgatggaatgggaagaggccagaggggacctggaggaagtggaatgccggaagcctaatgaagcagggcttgaggacctgggatagggggtgtcatacaggggaaaggggttagataggtcaccgaggctcctggccagtggtatagaggaggcctgagagtggttgaaagtccatgagtttggggcagggagatgatgggacggggagactataaggacaccctggtgaaggatagaggggcttcagggtgggagattgcctagaagacatggaaggcagtgtggagggggctagaggggcagctgaggggaaaggagggacccaaggaacacagaggaaaagagctgtcggtgtaaggtcttgggagaacctgtgacagggaacggggggccaggaaagaagaggacattagagtaggggattggggaaagggtagaagaaggagcgcccagacctcaaggaaggcgttgggttctgaagtgcttgaggggtagatatctggaaagctgggaataggggaagtctaatcccagagagaggtcaggggtcaggcagcaggacaggcagggatctgagcccttttctatttgaccacagtaatatggggacggtggtccctgccaggaagagttgtcgtgacgatgggaatcctggcggcaagtcagctctcaactcctgggaatggctgtgggtgattggagctgccaggagtcttcagaggctgcatccgcatgggctctggggtcagccagacttgggtttgcgtttgagcactgccactccctggctgtgtgaccttgaatgagggacttcacctctcggtttcctcatctgtcaagagagactgctgatagtatcttcctgaggggcttgtgacaatgcccctcaggcctttcactcgttccaggccccagatggaacttggctattgtttttactccgttggctctgaacagcagccctgtaaagtacccagtgatggttgttgttttagaatttaactgttatggaaggatctggcatgtaataggtgctcagggaacaggagggtggaaacagttgagtatcagttggaggagaaatgatcacttgttatgataaggggcggggctatgggggttgtggaggagctgggagccactgttagcagacgggggctgcctctgttacccaccagggatgtgaccctccacgagttgtttaacctctttcaggacgttttcttgtctgcaaacttcattcataacagtgtcttgcctctgaaggctcatttattcattcattcacttgacaaatactttttgattgctctagtgttgtccaggccctgttctaggtactggggtgacaatagtgaacagaaattcctgttcttgctggtcatggtggctcatgcctgtcatcccagcactttggggggccgaggtaggcggatcacctgaggtcaggagttcaagaccaacctggccaacatggtgaaactccatctctactaaaaatacaaaaattagccaggtgtggtggtgggtgcctgtaatcccagctactcaggaggctgaggcaggagaatcgcttgaacccgggaggcagaggttgcaatgagccgagattcacaccattgcactccaggctgggcaacaagagtgaaactccgtctccaaaaataaaaaaaaagaaaaagaaactcctgtccttgggagctcccttccccgaggaagacagaacatatgcacagggaacaccctgatatacaacctcaggacctgactggttctgtgaagaaaaataaggaggaaatggtcgggagagggactaggatggagagggtactcagtaggcctcgtggaggaagtcatatctgagtggagcaagccctgtggattttggaggaaaggggtcctggcacagggaggtgcattcagaggtcctgaggttgcggcatgcttgacatgtgttcgagcgagagggagaaggtcagtgtggctgaagctgtgggagtgaaggggagagagggcgggtgtggaggggagtgggaacaggatcgggaaaggctttctgggccatggtgagcactttggcctttgtctgcatgagaatattttgagcaggggagggatgtgaccgattgatgttttaagataattcctctggctgctgtgagaacagattctagaggtagccatggaagcagggaaccaaattaggagggtgttgcaggcctctgggtgagagatggtgctggcttaacagggtgagaagggactggtgagaaatgggttggtgatacatttttttttccgagacagtctctgttgcccaggttggagtgcagtggcacgatcatacctcactgcaacctccgcctcccaggttcaagcaattctcgtgcctcagcctccccggtagctgggattacaggcacccgccaccacgcttggctaatttttgtatttttagtagacgcagggtttccccatgttggccaggctggtctcgaactcccaacctcaagtgatctgcccgccttggcctcccaaagtgctggcattataagcgtgagccactgcacccagcctgggatacaacttgaaggaaaaactgtcaggatttgcaaagggatttgatgatgggggttggggaaggaaagagatcgtcccgtcactgcaggaccccagagacgagccagaggacagaggggagatgcaggcttggggcactggtagtaatttagccacaggaattagggctggagaatcaggagccttttcttagcaagcgtatgttgaacggctggtatgtctcaagaattgtgctgaatgctggggacactggtgaacaggacagacttgtccaccccctccatgaagctcccagccctgtgggggagaaggtgcaacatacaaattgcagtagtccttcacactaatacctggacacggatgttcactgcaacattattcatgatagccggaaaacagaaacgggccaaatgcccatcaactgagaaataaagtgtggtctatgtagtggaatattaccgggccttaaaaaataatgacgtcctgctacatgctgccacagggatggaccttgaaaacatgacaccaagtgaaagaagccagacacaggaggccacgtgttgtatgattccatgttgatagagtatcttgaataggcagatccatggagacagaaagattagtggttgcctagagtaggggctggtgggatggggagtgactgctcatgaatgcataggttctttttttattttttgagatggagtctcactctgtcgcccaggctggagtgcaatggggtgatctcggcttactgcaacctctgcctcccaagttcaggcgattctcctgcctcagcttcctgagtagctgggattacaggcgtgtgccaccacacctggctaatttttgtacttttagtagagacggggtttttacatgttggtcaggatggtctcgaactcctggcctcaggtgatccactaccccagccttccaaagtgctaggattacaggtgtgagctaccatgcccggcagcattcagagcttcttttgggttcatgaaaaagcctacagctggacacggcacatgcttgtagtcccagctacttgggagactgaggtaggaggatcatttgaacccaggagttcgaatccagcccgggccacatagtgaaacctcatctcttaaaaaaaaaaaaaaaaaaaaaaagaaaggtcctggaattcgatagtagtaatggttgcacaacatcatgaatgtactaaagaacgctgaattgttcactgtaaaagggtcaattttatggtatgtgaattgtatctctttttttttgtgacagtcacaaaaatggcgcgatcttggctcactgcaccctccatttcccaggttcaagcgattctcctgcctcagcctcccgagtagctgggattataggcgcccgccactatgccccgctgatttttgtatttttagtagagacagggtttcaccatgttggccaggctggtctcgaactcctgatctcgagtgatctgcctgcttcagcctcacaaaatgctgagattacaggtgtgagccaccgcgcctggccgtatctcgatttttttttaaatggggaaagaatttgcagctgtcctaagcccagtgaggaagagggccatggtgttgagagaatggggattctgtgtggtcagcgagctgcggcctggctttgcttcacaagagacctttggagctgtgtgggcaggaagtaggggagttacctaggctgagggcagtgagaagagctgtgaaggcagaggcggggcaagtgcaaaggtcctgacttccggacgccatggcgggcatctctatctagtcccagctactcaggaggtggaggcagaaggattgcttgaggccaggaatttgagaccagccttggcaacatagcaagaccctgtctctctttcttttttttgacagagtctggctctgtcatcccggctggagtacagtggtgcgatctcagctcgctgcaacctcctcctcctgggatcaagctatcctcccgcctcagcctcctaagtagctgggactataggcacatgccatcatgcccagcaaatttttttgtatttttc[137 bp omitted]atgttgcccgggctggtctcaaattcctgggctcaagtgatctgcctacctcggcctcccgaagtgctgggattacaggagtgaggctcagtgcctggcccccttctctattttcaagaattcttttttttttttggaaacggagtctcgctctgtcccccaggctggagtgcggtggtgcgatctcggctcactgcaagttctgcctcccgggttcatgccattctcctgcctcagcctcccgagtagctgggactacaggcgcccgccaacacgcccggctaattttttgtattttttttttagtagagatggggtttc[143 bp omitted]gtgagaccctgagaaaagggctgtgtggctggtgcagagagggatgggatctgacgctggggagtgggcagaggctaggtccgtgtttgtcctgagagctctggagaaggtttcaagcaggagcgagggaagagaagggcggagggatgcggaggaggaggtggggagaggcagggctcagagagcagcagagggaagagtgtggagccagccagcaggaggatctgaagggcacagtggggctatggggaagggtctagaaggtgaaaggcaggctctaaggagggcagggagggcaaattctgcagataaggagggggagaggttgaggctgggcccagcccgagggcgtgttctgtcctgtctgcagcaggaatacagcagaagtattatctcacagggagcaagggctggggctgcctcctatctaggcagagtctggctggagtgggccttaggagagttggacgagtgagccaatgggagcggggtgctggctgcacactgccctgagctcttccatcagagcacatcccactccaaatggtgatccactgcagtggtgacatcgagcccaggccctgggtctcactccagctttgtcctctgtaggttctagcccatgggaggcctcaggagatgattgccagttgaatgaatgaatgaatgatggaaccagtctttcttgagttccagctgggtgccaggcactgttctaggtgatggggctacagcagtgagcagaagttcctgccctagggtgctcacgttctagagaggagatggtccactacacaggtgaatattttgggggccggacaggtgggagtaggtgttgatggaaaatgaggcaaggaaagggcttggggatggagttaaggatgatgctcttatataggctggtcagagagtgtcgctgaaaaggtggcattggagcagagaatctaactaagtgggggaatggtgcatgcatgactctggaagagggagctgcctgtgcaaaggccctgaggcaggattgtgcttgtagtggagcagggacttaggaggaggagagggcagctcctgccttggagagagaggacaggagaaccggccagagagggaacagggtagatggtgcaggcccttgtgggctgcagtgagaactttacttttacttcgaacttgctgggagccatggaaggggtttggaggagtgctggggtctgactcaagttttcacatgatccctctggcctctgtgaagagcacaggaagtcaaacagatttcaatttggtatcccttaagaacgggacagatgcaggcctgagccccagccccacccgtttccagctggttattgtgtgatggctttggtccacaaatccgcattcaacacctcccctgtgccaggctgccctgggccctgggaacactgtggggactgaagcagccgtacatccctggcctcatggcactggtgttccgatccaggaggaaatgaacatgcaaacccttaatatgtaaggaggcaactcaggcagggtcttggtggcccaaatagttcgccctgctgagcaggggggctgaccaggagaatgagagggtttgattttgttatttacgaagaatatattttcatcacccaggaatagtgatgaccttgagaatatgagtggtgtaacccagcaccaaaatgcaagccatatatatgttgaaattttcttttttttttctttttttgagacggagtcttgctctgtccacgcccggcat[143 bp omitted]aactccgtctctactaaaaatacacaaattagctgggcctcgtggcacacctgtagtcctagccactcgggaggctgaggcaggagaatcgcttgaacccaggaggtggaggttgcagtgagccgagattgtgccactgcgctccagcctgggtgacagagagagactttgtctcaaaaaaaaaaaaaaagcaaaacaggctgagcatggcagctcacgcctgtaatcccagcactttgtggggccgaggcgggcagtttggttgagcccaggagtttgagaacagcctaggcaacaagatcctgtctctccccaccacaaaaaaacttttaaaattagccacgcatggtggcatgcacctgtagtcctagcttcttcggaggctgagatgggacgatcgcttgagcccaggaggtcgaggttgcaatgagtcaagatcgcaccaccacactccagcctggacaatacagcaagaccctgtctccatatattttttaaaaaagcaaaataatcagtgaaattcattttaatatattttctttaccctagtatatccaaactattatttcagtgtgtaaccagtgttttttgagatggagtcttgctgtatggcccaggctgagtgcagtgtcaggatctcagctcactgcaacctctacctcccaggttcaagcgattctcctgcctcagcctccctagtagctgggactacaggtgtgcaccaccatgcccggctaatttttgtatttttagtagatatgggatttt[132 bp omitted]ctgcctgtctcagcctcccaaagtgctgggattagaggcgggaggcattgcacccagccttcagaaggctttctgaggattcagggctgctggggcttgtacaggaagcacatcaggtctcggtctctgtagaggaaatgtccttggtctagaaggctctgaaggcctttgcggtgagatgctgggtgatgcctgtgttaccttcataaatgcacattagtccctccagggcagggcccaggtttgacaggatgcctttgctggtagtaacagacccaccctgatctggggcttacatgtttagggaaggcgttatctcccctaaccagaagctccaaggtaaggcagctccctggccccgtcagcacttcccttgactctgccttactctgcctggagcaagatgttggccgccttcgcacccgaacacccctcacggcaacagccactggacggagcacggcctgcccctcccatggccccccccagcacctcagaaaactctggagaggctgcgtggtctggccccacctgctgtgctcttctccacccgcccccgccgccgcccgcatcctcagactctgtgcctctttcatcaccgtccgcctgccttgcctcatgctgtcctacctccaggccattgcacctgctggtcctcctgcctggagcgcgcctccccttgtttctgcctggtccatttcagcctcatcttttgatcctcagatcccagcagctgtgtgcagagaagccttccccgtcccctgcgccattctcattttagcctctcagccccgaaatgtgtatacctctttcagaatacttgccactgtccctgtctgccaccactccaatccagggatgcctcgagagcagggtagatgtgactcatccttaagcctggccccagaaatcccattgtgaatgagagaatccctttaaaactctctcacaggcttgcttgcctcctgtgacagtgagctcattccccctgttgctggccctgaatgccgggtcattcttcccatgatcctggtctgtcagagctgcctcagccctttccccaggcaccaccccagtagcacccatacagtatccctgggctccctggccatcacgggcctttagatctttgcagagctgggcctctgccagagccctccctttggggccacaactgctcctgttttgaagaccgagagcttttcttctctctctgaattcctttttttatagcaaattataccagttatgcagaagatagcatcaaatagatgtggaccatttaaagcctatttaaaggccaggtgcagtggctcatgcctgtaatcctagcactttactttgggaggctgaggcgggtggatcacttgaggtcagaagttcaaaaccagtctggtcaacatggtgaaaccctgtctctactaaaaatgcggaaaaaaaaaaaagccaggtgtggtggtgggtgcctgtaatcccaactgctcgggaggctgaggtaggagaatcgcttgaacctgggaggtggaggttgcagtgagccaagatggtgccattgcactgtagcctgggtgacagagcgagactctgtctcaagaaaaaaagtaaaaataaagcctatttaaagaaaaatatacatatatatgcatatttgtatatatatgtaaatacattttaaatacaatttaagtaatactttaaaaagagatttccagccgggcgcggtggctcatgcctgtaatcatagcactttgggaggctgaggcgggcggatcaccaggtcaggagattgagaccatcctagctaacatggtgaaaccccatctctactaaatatacaaaaaattagccaggcatggtggcgggcgcctgtagccccagctacttgggaggctgaggcaggagaatggcgtgaacctgggaggcagagcttgaagtgagcagagatggtgccactgcactccatcctgggcgacaaagcgagactccatcacaaaaaaaaaaaaaaagatttcctggcagtaagcggtggcccatgcctataatcccagcacttcgggaggctgaggtgggcggaggagttgagaccaccctgggcaacatggcaaaaccctatctctacaaaaaatagaaaaaaaattagctgagtgtggtggcgcacctcacagtcccagctacctgggaggctgagatgggagggtcatttgagcccaaggggccaagactgcagtgagctgagatcaaaccattgcattccaacctcagtgaaagagtgagaccccgtctcaagaaaaagagaggaaatctatatattatagatataataatatgtatttctttaaatgaatactagttaaagaaatacgtaaatataaatatataagtacatatgatatatatttctttaaatttaaagaatatttaaagaatacatatacatgcacatatttgtgtatatatttaaatcatttcaagtacaattgagtgaatacactcgtgtattaacgatggggatatgttctgagaaatgcatcgttaggtggttttgttgtggtgtgaacatcctggagtgtgcttacacaaattgagatggtatagcccaccactcactgaggctctgtggcgcagcttgttgctgctgggctgtaaacctgcacagtggccaggcgtggtggcttacacctgtaatcccagcactttgggaggctgaggcaggcagatcacttgaggtcaggagtttgagaccagcctggccaacgtggtgaaacctcgtctctactaaaaatacactaattagctgggtgtggtgacgcatgcctgtcatcccagctactcaggaggctgaggtaggagaatcacttgaacccaggaggcggaggttgcagtgagctgagatcacgccattgctctccagcctgggcgacaagagtgaaactgcgtctcaagataaaacaaaaaaacctgcacagcatgggactgtcctgtaggcaaccgtgactcagtaagtatttgtgcatctaaacatagaaaaggagcagtcgaaataaggcattagaatcgtatggaaccactgcagtgtgtgcggtttgttgctgactgaaatgttgatatgcggggcaggactgtattgaaataatacatattatttaaattaagtaatacatatatttaaataacacatattctttaaatatgtgtatactctttatatatactatatttatggtatgcatatgtatatatacgtatttatgacaaaaccatatatatataggccaggcatggtggctcatacctgtaatcccagcactttgggtggctgaggcaggtggatcacttgaagtcaggagttcgagatcagcctgggcaacatagtaagacctcattgctaccaaaaaaaaaaaaaaaaattagggctgggcgaagtggctcactcctgtaatcccaacactttgagaggccaatgtgggcagatcacgaggtcaggagattgagaccatgctggctaacatgctgaaaccccatctctactaaaaatacaaaaaattagctaggggtgggtggcaggcgcctgtagtcccagctacttgggaggctgaggcaggacaattgcttgaacctgggaggcagaggttgcagtgagctgaaattgcgccactgcactccagcctgggtgacacagtgagactccgtctcaaaaaaaaaaaaaaaaaaaaattagttgaatgtggtgttatgcacctgtagtcccagcgactttggaggctgaggcacaagaatcactgaacccaggaggcagaggttgcagtgagccgagattgcaccactgcactccagcctgggctacaaaaaaaaaaaaaaaaaaaaaaaacagaaacaggcaaaattaattttaataatatgtctctataacccagtacacccaaattattatttcagcatgtgatcaatactttataatttgtattgttttatttagttgacacacaagttctcactgtgttgtccaggctggtctccaactcctgggctcaagccatcctcctgcctcacatgcgtgagccaccacgcctagcccctataatttttactgaaatattttacattttttctccacactgtcttctaaatcccgtgtatgtttgctgttgacagcccctctcagtttggaatggccacatttcaggatctcaggagccactggctggcaactgctatattggatggtgcagcgctagggtcctcttagcactgatcaggaggtgctaatcagaggggcttcctggaggaggtgatacctgaagtgaggcttatgggagcttccatagaagttgggagcagggacaagacaggatttctagagagaaggatggcacatatacttgctttctcagtcattgactcatttgttgaatgcacaccccaccctgctggggactacgccctgaaggatgtgggtcagagcagatctctgccccttccataactagacatttatagagcacctgctgtatgcagggcactgctctaggagctccctcctgatgcttacagtctgaagtgggaggaagttcgacagtggagagaaataaaattgtgacatggtgaaatgtaccagagaggacttcttgaaaaataactctttaagcagaataataaagaattgactttaaggaagtgaaacggaacggcctttcaggggtggcaggagccgagacccaaatgatgggaagatgacaggggaggggtggccccaggaagagggcacagcttgtgtgaaggcccttgaggcaagaggatgtgcgtgttcccggagcaaaatggaggccagggggcctggatggacagtaggggtctgaggggtgacaccggcagggttgctgtgacaggggcagaggacttgatgggccgtggagtggagcacccccagctggcatcacagagcccaggatatggaaacacgagggaggcaagaaggctggaggggaggctgcttcactgacctgagcgagcgagcatgggatctggatgaagtggtcatcgtggaggtgctcaagacatgttctgaaggtcaagttaggaggaggtggctgggcacagtggctcatacctgtaatcccagcattttgggaggctgaggtgggaggatcgctggatcccaggagtttaaggtcacagtgagctatgattgcaccactgcactgcagcctgggcgacagtctaagaccctgtctcaaaaattaaaaggacgaggcagtagcccgattggcgtgaggatgtccaggttctgtttggaggagaagagggaacggtagaacctgtcaagggagggatgaagtctggggtgagtggaacagggacaggagaagcagagagggcagccgagagcatccagtcggattgtgctctgaagggggtgctgtagggcattgaggagcatggaggaagcagagacctggcctgcaggatcaggggaggctttctgtgcttattccacaagcaggtcctgtcagaggtgtaggaatgtcccagacaaattggggagaggttggcagccagagaacaggaggcagtggggacaggccacgcgggagaggacaaagccatggctgtggggacaaagggggtgaggacagcacccaagggtctgacctggtgactgggtggacagtgggaccttcatgggattgagaactggaagaggcagtgagctcagtggtaggggtgagcaccctgcggccagccaagctctttattcattcattcattcatcacatgttcatcgcatgtggggagtggggacaggagctctcagggagcgtgtctggggccctgaggagccccacaaatcaggggccacagtggtaggaggaaggagagaggaagtcagggacagcccaagggtgtgtgctctgtgctgtggggctcagccagcggtggttcttccctctttgaaactcccagccagagaaggggtcctggcctgtcctgagccccagggcttgggggcggagaagatctgcccttcctgctgggtggggccgcgcctaggaaagagagggcaggtggctgactccccagacccctcactgcctaccctcctcctcctctcccaggtaagagcaaagaggcggaaattaagagaatcaacaaggaactggccaacatccgctccaagttcaaaggtaggctgggggcccaacttctggttctgagggaggagggggctgggagctggggctcctgtgacctatcctgtgacccttccttatttctggctcccctttcctccttcctctgccctaggagacaaagccttggatggctacagtaagaaaaaatatgtgtgtaaactgcttttcatcttcctgcttggccatgacattgactttgggcacatggaggctgtgaatctgttgagttccaataaatacacagagaagcaaatagtgagtctggagaggggggtgccagggcctggactcctgggtctgcgggggagggggctggaggtctggactcctggatctgggggaggagggggtctaggggtctggactcctgggtatgagggaggagggggtctggggctctggactgctgggtctgagggaggagggggctgggggtctggactccccattctgagggaggagggctggaagcccagactcctgggtctgagggttgaatctggggcctggactcgtgggtctgagggaggaggggcctgggggcctggacttgtgggtctgagggaggaggggcctgggggcctggactcctgggtctgaggttgaatctggggcctggactcctgggtctgagggttggatctggggccactcagtcacaaggctcctagccatccacgacctccctccccacagggttacctgttcatttctgtgctggtgaactcgaactcggagctgatccgcctcatcaacaacgccatcaagaatgacctggccagccgcaaccccaccttcatgtgcctggccctgcactgcatcgccaacgtgggcagccgggagatgggcgaggcctttgccgctgacatcccccgcatcctggtggccgggtaaggcactggggacccgttggcagtggggggcctgggggtgatgagtcccagccaagtgtgaggctcagagaggctctgttgcctgcccaaggtctcccagccgagatgtgggctaacgctgggctggggacccagtggttccggtggcagccccatacttgtctcttcccgtgatacgaagctgacttgatggtgtgaggctgctcccggcaaagccagtggggtgtttctgaactgcagaattctaacacctacgataagaggcgtaactgtgctatgtgggtgacggccctccagaacttcctcatcttctccattcattcaccaaacatttactgagcacatactatgtgccaggcactgtgctgattgctggggatgttgtattgtccagagatggacacggtcattgccctcctgtgttcatggtctggagcaggagacaaatggtgatggaagaattgcaggatgaagtgtagaatttgccaggtgcgatggctcatgtaatcgctgcatttggggaggctgaggcaggtagattgcttgagtctaggagtttgagaccagcctgggcaacatggcaaaatcccaatctctactaaaaataccaaaaattgccagggcatggtggcgtgcacctatagtcccagctactcgggaagctgaggtgggaggatctcctgagctggggaggcctaggctgcaatgagttgtggttgcgccagtgtactccagcttggtgtgcacacaggtgagacttctatttctggcagtgtggtcagctagatacccgactcatgttctccctgaaacctaactgtcaatattggataaaagaggaaagacaatattatttaatggattcatgaggtagccagaaaatgaggagcacacaggccacaagctaagagaagccgggcacccaagcagatgagccgcgtgctggagccagcatttgcttagaaggcatttgctgaactgggtgaacccgagtatcggttttggggccctgcagcctctgggaacagaagacaaagcttgtccgagaagttctcgaaggctgtacttcaaagtgagagtgacctagaaataaacccccttggggactatgaggaaaattacctgtctgaaacgttggcacggagcagccctcagactggttttcagcctgactttaccctatctgggtagtccaaaagcccctaagtcaacctttagtttaaagtgatggaaactggaggttccctagtgcttcacagaagcaaacacgagccttttctgaggaagcccattttcaccacaagcttcagtgatatccacagataaagctccaaatgatatgagtagctcacagccaaaaatctctaaacacatgacacaa[133 bp omitted]catggcgaaaccatatgtctactaaaaatacaaaaattagccaggtgtggtggcacatgcctgtaatcccagctcctctggaggctgaggcaggacaggagaatcacttgaacccgggaggcagaggttgcagtgagccgagatcatgccactgcactctagcctgggtgacagagcaagactctgtctcaaaaaaaaaaaagaaaaagaaaacagaaaataactttggaattggaattatacagaatgtaaaagaagtatatttcatatgtttcaataaataagagaagcattttaaaatatgagtaaagtttaagcagatttgaaaatataattgaaatagtcaaaaattgccaggcacagtagtggcttacacctataatccaggcactttgggaggctgaggtgggaggatcacttgaggccggaagttcaagatcagcaacatagtgagaccctattgccacaaaaactaaaatattagccgggtggggtgctgtgtgcctgggtagtccatccaggaggctgaggcaggaggattgcttgagcctgggaggatgaggctgcagtgagctatgatctcatcactgcactctaacctgggtgacagagtaagaccctgtctaaacaaacaaacaaaaaaaaccaaaaaacaaataaatgtttaaaacattaaaaattaggtgtctgaatttagttagcagagtaggcacagccaaagccagaattagtggcctggcagtagaactgaagaaagacatcaaaatgcagcccaaagaagacaaagcgatggggattttaggaaagagacaaagactcatggaagacagagaacatctaacagaattgccatttagagttgtagggagagatcgtgacataggcagtgttcgaagagagataatggttgaaaatattccagaatggatgaaagaggctgatccccagattcaaataggccaggaaatcataagcaaaagtacagactgtagggggtgactgtggggcagcaagaccagccaggcatctgtcaccaggtccaggtcagagctcgcggtggcttggaccagggctgtggcggtcatgtggttatgagaagggcatgtttcgggagtagagtcgatggattatatgtgctgtgctaggatgaggtggggacattgaacaggtgagtgaatgatggcagacctttcagcaatgtgacaaaggccataggaaaatgggtcagagagggcagaacctgagtgtggtttggtcatgctgaatttgagatgtgtattagacatctgagtaggactctggggaggaagttggattgcagggagtcagggcgggagggagagagatctgagagagatcggcaccgtccaataaaaatataatgcaaaatacaggccaggcacagcagctcacacccgtaatcccagcaccttgggaggccaaggtgggcagatcacttgaggtcaggagttcaagaacagcttggccaacgtggtgaagccccgtctctactaaaaatacaaaaattagtcaggtgtggtggcgggcacctgtaatcccagctacttgggaggcttaggcaggagaattgcttgaacccaggaggtggaggttgcagtgagtggagattgtgccactgcactccagcctgggtgacagagcgagactccatctcaaaaaaaaaaaacattagtggggtgcagtggtgcacacctgtagtcccagctactcaggaggctgaggcaggagaatcgcataaacccggggggcagaggttgcagtgagccgagattgcaccactgcactccagcccgagtgacagagtgagactccatcttaacaaaaaacaaacaaacaaaaagcaaaatacaaatgtgtgcctgtaatcccagctactcgagtgactgagatgggaggattgcttgagctcaagaggcccaggctgcagtgagctgtgatcatgcctaggtgacagtgacaccctgtctaaaaaaaatataatgcaagccacataggtgtttttctgttttctagtatttaatatttcagtttaacctgatccacacaaaatattatcactttgacactgaatcagcgtaaaaattattcacgagctattttatttgacatctgtgtttggtgctaagtctttggaatgcggcgttgcgggtgtctctcagtttggactcgctgcagttccagtgctctgggggctgttgtatctgacagcatggggattgatggcagttaagctcgggcctggtgaagcccctgagggcaggtgttaactgggaattcccaaaagctgggcccttgagtggccctggtgcagcccagcgtgttacgctctggcagggggggtgggagtcatgatcaggggtgtgggaggaaaatcaggatcaggccatgactcagaatgctaagaactttgatggaggagggagtggccagtcgcaaatgctgccagcagtttctttaggacaaggacaggcagtcagcatcagcttgggggagacagaggttacaagccaccctgaagagggaagaaccgggcactttgaggactgagagggaggccaccgtggccaacatgtgtgggtgcagatgacattgtccctggagtggatgccgaggggtggtgctctgccagggtcaaggggccagggtggggctgtctggctctaggctgccccctccacactggaaacttggcctcagcagtgactggggcacgaaggaactttattttgtaggtagacttttatttaactttttattttttggagacagggtcttgccctgttgcccaggctggagtgcagtggcacagtcttggctcactgcaacctccgactcctgggctgaagcgatcttcccacctcagccccctgagtagctgtgattataggcgtgcaccaccatgcctggctaatttttgtatttctttttttttttgtagagatggggttttgctatgttgcccaggctccaggctggtcttgaactccagagctcaagcaatcctcctgcctcagcctcccaaagtgttgggattacaggtgtgagccaccactcccatctaggctttttttgtttgttttttttgttttttgtttttttttttttgaggcagtctctctctgtcacccaggctggagtgcagtggtgcaatcttggctcactgcaacctctgcctcccaagttcaagcaattctcttgtctcagcctcctgagtagctgggattacaggtgtgtgccaccacacctggctattttttttttttttttagtagagacgaggtttgccatgttggccagactggtctcaaactcttgacctctattgatccatctgcctcagcctcccaaagtgctaggattacaggcgtgagcctctgcgcccggtcattttaaccatttgaaggtgttcagttcagtggtttctagtatattgatgatgctgtgcaacaaccactaccacctaattgcagaacactcattgctccaaaaaaagactctgtacccattagcagtccctccccattccctcttccccccagcccctggctgccaccaatctgctttctgtcacagatttgcctaatgtggacatttcatagaaatggaaccgcacagtaggtggccttctgtgtctggcttcttccactcaacaagatgtttttcaggttcatccacattgtggtgcatatccgtgatttgctcgagatagagtctcactctgctgcccaggctggagtgcagtggcatgatcatagctaactgcagccctgacctcccaggctcaggtgatcctcccacgtcagccactccagcagccgggactacaggcacaagccaccaggcctggctaatatttgaattttttatagagacagggtctcactatattacccaggctagtcttgaactcctgagctcaagtgatcctccgtggcctcagcttcccaaagtgctgagattacaggcgtgagccaccgcgcctgacttgtggttttattttttatacttgaatatgcagcttgatattgtgtagtttaacattttcctaagtagcgccatagcccttattccacttaaccaagttgataaatagctcttattcctttgtgtggtatccttatctgtaaatggagatgatagaatccgcgtccttagagggctgtggtggggagcgagcgagctgtgcgggaacacttagagcagagtttggcccagagtcaggactcgggagatgcgctgtggctcaggagatgtgtgccgtggcagcgatgggaaagtggcccagagtcagggctcgggagatgcgctgtggctcaggagatgtgcgccgtggcagcgatgggaaagtggcccagagtcagggctcgggagatgcactgtggctcgggagatgagcgccatgacagagatgggaaggtggcccagagtcagggctcgggagatgcgcgccgtgacggagatgggaaagtggcctggagtcagggctcgggagatgtgcgctgtgacggaggtgggaaagtgccgtcacaaatggagcatcgtctgtggccaggcttcttgctggtttctggttctaacttgatgaccactgggcagtgaacgtttctgtagggtgagcgtctgggggcagcactgctggtcttggtctgctgcacacacagcagtggcctttctagacagaggaagcccagagcctctccagagggcctgtccctgtgtccgcctccagctgcagcacacgagggttcccagcactttaggaggccgtagcaacaggcgtcagtcgggcgagtatctgcctggatgacggcaggagccacctgctgggtggctgcacatccagtgagacatgctgccacaggcctttgactcgtgcaggtctcccctctgaggacttctcccctgtgtcttttgctgtctgttgggtgctttctgggaaaccctttactgataggccatggctgggccagtcttgacagctcccagcacctcctcttactcaaggctatggccatgcaccacacaatctcatttctgtttttttttgagacggagtctcactctgtctcccaggttgaagtgcaatggtgagatctcagctcactgcaacctctgcctcccaggttcaagcgattctcctgccccagcctcccgagtagctaggatttcaggcacgtgccaccatgcccagctaatttttgtatttttagtagagatggggtttcaccatgttggccaggctggtctcaaactcctgacctcaggtgatccacctgcctcagcatcccaaagtgctgggattataggtgtgagccactgcgcctggcctttttttttttttttttttgtagagacagggttttaccacgttggcctggccaggccggtctcaaacacctggcctcaagtgatccgcctgcctcagcctcccaaagtgttgggattacaggtgtaagccaccatgcctggcccaccatcttatttctttctccccaaagccgacaaggctcctcattttcctgaaggggaaacagcccatcagagagggtcagtggcttacccccatctgtgccccacagtcacaacctcatgcaggcgtgtctgaccccagaaggtgctcccctgggatcctcttctagaacaacatcatgctccatgctctttgctgtgctaggagctgggttatggttggggcctggagtcagccctctgagatgggctgcccgctggctgccaggttctgtgccaggcaagtgctgaccctggtttcctgtgactgctgtgatgaattaccaccagcacagcggtgtcaaacaccggttctggatgtcggaagtccaacatccatctcacggggctaaaatcaaggcgtgggcagggctcgtcccttccgggggccctagaggagaggccgcgtccttgccttctccagctcctagaggccacctgctttccttggctcgtggccccttcccccatccccaaaggcagcagtgtggcatcttctctcctgcctgacctctgttccatcctcacatcatctctgactctgaactgtatctttcccttataaggaccctgtgatgacattgggtccacctggatcacccaggatcctctctccatctcatgatccttaactttatcatatctgcaaagtacccccacccttttttttgtttggagacagggtcttgctctgccacccaggctgcagccttcacctcccaggctaaagcgatcctcccacctcagcctgccaagtaggtgggtctacaggcatgcgccaccacgcttggctaattctcatatttctagtagagatgggggtctcaccatgttgcccaggctggtctccaactcttgggctcaagtgattctcccacctcagcctcctaaagtgctgggattacaggcgtgagccaccctaacccccagaacctgtgaatatattcccttggattcaaaagagccttgcaaagtctgttccctcacaacaggcagagggaccctttaaaaacctaagccagatcaaaaatacacccattttctcagtttgttgtggagagaagataaacgtgtgaatccacccagagacctgtgggagtgctggacaggccgaaggggtccgggggcagctgttcctgctgtcgtgttaacatcacgctgattctctgctcaccacccacagcggctttcatctcccaatcggtaaaaagccaagtcctcacttcagccaacaaggccctgcagggtctggctctctgttccctccctgtcctatctgcagccctcctgccccatggctcaggccgcagcctgcaggcctccttgctgctcctcctacacacgggctccgccttcctgatggccttggcacaggctgttccctctgcctgggatgttctgttgcagaggattttcagtctttcctccttaagttactctgttttgtttatttttaaatttttttatttatttagagacagctctaactctgttgcccaagctagagggagtgcagtggcacagtcatggtgcactgccgcctcgacctcccagtctcgagcaatcctcccacctcaccctcccgagtagctgggattacaagcctgcgccaccacacccagctaatttttgtatttttgaagagactgggtctcactgtcgcccaggctggtcttgaattcatggcctcaagtgatcctcccacctcgacctcccaaagtgctgggattataggcgtgagccaccatgcccagccctgacagtatttgatgtatgtgttttcgtggtgctgtctgaaatgtaagccctgtgaggacaagtgtttggaccactttattcaccactctatccatggagtgaacagcagtgcctggtaccccatgggcacccagtaggtgcttggtgaatgaatgaaggtgcagagccaggcttgacatgttcctgagccctgtgaggttactgagatgcaatcattttgcagatgaagacactgagtcctggtgggccgtgaggtcagcgccagactggatcctgcggccgcctggctgtctgtccctctcgctggcctcgcacacccttcctgggaggaacaggagaggaggggaggtgtgcagggctggggtcactgactctgcttcccctgccctgcatggtgtccccacagggacagcatggacagtgtcaagcagagtgcggccctgtgcctccttcgactgtacaaggcctcgcctgacctggtgcccatgggcgagtggacggcgcgtgtggtacacctgctcaatgaccagcacatggtgagcccccagccctcacacccccggatacccagggctcccacctcagccctgacccccctggatgcccggggctcccacctcagccctcacacccccggatacccagggctcccacctcagcccacgcaccccctggatgcccggggctcccacctcagccctcacgcccccggatacccagggctcccacctcagccctcacgccccctggatgcccagggctcccacctcagccctcacgcccccggatacccagggctcccacctcagccctcacgcccccggatacccagggctcccacctcagccctcacgccccctggatgcctggggctcccacctcagccctgatccccctggattcctggagcttccccctcggcgctgacgttcaccagacaccagaaaccatgatccagtgtccccggtactcattacctgcccaagtgtccagaaaccctcccatccccatctctgacactcccctggctggccagggatcctgtccagtgacccccacacccctcaccaaccacccagtcccttagaaaatcccactctgtttctaatacctggagattcccccaacagcgcccatcacctgcgcaccagcgcagaaaccttgactgtcccacccccacagtcccaaccctctagagtctcgccccttcactgctccttacccagctgcctggggtcctgccagggacaccccacacacccaggtcagtgctggccatggcgcccgaggccccgtggcctcctcaccccacccctaaagcacgcacagtgacacatgtgcacacccctaaaccccatcttcccgactgcacacacatcccgaccctgtcccgctcctgagcctctgctctcaggtaccacctcccccaggggcctgacttgtctctcctctgcccctgcagggtgtggtcacggccgccgtcagcctcatcacctgtctctgcaagaagaacccagatgacttcaagacgtgcgtctctctggctgtgtcgcgcctgagccgggtgggtgtggcctagatattggctgctggaggtggccctggcatccctatgccctctgacacccctcaggcccccactctccctgagaggcagcccagcccaaggtttacaaactcaggctctgagctggattcatcctggctcggcctcttcctggctgggtggccctggacaagtggcttcacctccctggcctcagctgccccctgtgttcagtggggataataccggtgcccacctggaggcacagagcgctgtggatagagtgctcagaacagggcctcgcgggccgagcaccccgggagccagccgccctcatgacctcctccctctcccacttctctctctgtctcccactttccctcttctggctttgcctcccgcctctctctttcctgtgcagcctctcactcctgcctggcgtccctctcccacctttgctcctgtcctgcccaggaacatcccctgaggccttgtgcatgccaggctccatgtcgggtgacaccagggacacagatgagtcagaaccaagctctgctcttaaggagctccctgtccttctggcagggaggtgactcagtcacagattgtcagaaaaggggtgactcgtgctataatggaggtaggataggtcacccataggaggcacttaacacagcctgtgagtccacgaaggcttcctgggggcggcgatcccagaattgagacttagaatacacatgcgcatctcctgggcagtcaggaagaggcctggattcgcaggcaaagagaagaacacaccagctcgtgcatccactcattgtttctttttttttttttttttttttttttttgagacggagtctcgttctgtccccaggctggagtgcagtggcgcgatctcggctcactgcaagctcccaggttcacgccattctccagccttagcctcccgagtagctgggactacaggcgcctgccactatgcccggctaa[141 bp omitted]tttctttctcaggttttttttttttttgagacagggtcttgctgtcgcccaggctggagtgcagtagtgcagccatggttcactgcagcctctggctcctaggctcaagcgatctctcgcctcagcctcccgagtagctgggactgcaggtgcctggctaatttttgtattttttgtagagatcggtcttgctttgtcgcccacactggtctcaaactcctggcttcaagtgatcctcccgcctcagcctccgaaagtgctgggattacaggtgtgagccactgcactcagcctcagtcattgtttcattcattcatcacacatctgagtactgcagtgtgccaggatgacagtgaggtaggaacacagaccagcacggaggtgggacagagcttcctggagaagggcttttcaaggttgaataggagtttgcaatgaggaaaaaaagtcacatgatctttctttttttttgagatggagtttcgctcttattgcccaggctggagtgcaatggcgtgatcttggctcactgcaacctctgcctcccgggttcaagcaattctcctgcctcagcctcccaagtagcatggatcacaggcatgtgccaccacgcccagctaatttttgtatttttagtagagatggggtttcaccat[137 bp omitted]cgaacctcttcctatctgaccttgtattaggcctagggacccaaaaaagggtcagacccaatccctgcccctgagtggcttcaagccttgtagggggactacaggaaacagcctccaggagccggtgcgctgtgtgctctgacggaggaagcctggggcatgggaggctcagagccgagtgaggagggggccctgggaaactgtcacacagaagggaaccagcagagacctttcctgcccaccacacaccagcattacttggaaagatcaaccagccgggcttagtcctagttttgcccccattcagtgtgcctgacgcttcctcgctcccttcccagagcctcagattcctgcttcataaaaccattgcattggtcgggcatggtggctcatgcctgtaaccccaggacattgcgggactgaggtgggagaattgcttgaggccatgagttcgagaccagcctgggcaacatagtgagaccctgtctctacaaaaaaaacccactaacaaaaccattaacactgacagcactgcccttggaaggcaccatttgctccaccctggcatgtggacccacgtgcccctcccaccccagcccccaacttatttcttgctcttccccgccagatcgtctcctctgcctccaccgacctccaggactacacctactacttcgtcccagcaccctggctctcggtgaagctcctgcggctgctgcagtgctacccgcctccaggtaatgaacgccgtgcactccccaacccggggtggcctgctgctggcatctgggggcctcctgctccacggcgcaccaggtgggactggagggtctgggtcaggatttctctgaagctggggcggttcctctgtccccttacgtggctgcactcggggaggcaagcaggcagcccgaggcccagcgcctaccctgtgcagcatcgtggatcagcctcatagctgaggtccctgctacccgggctctcactccagccctgttgcgagggactgttaactgtgcctgttttatagatgaggaatctgaggcttggagagggagctcctggcccagcgtcactcacccggtcagtgggtgattccaggccgtgctacctgaattaccatagccctgtcaggggttttcacatctgttgggaaccttcccctactgctcacagtcacaatagccagtgtgtatgaaactcctgtagtgagccaggcactgggcagggggcacctgcacctgccgaacagagctggcaaggaggaacagccagtgtgatatgcacacagggaaactgaggcttggaggtgagacatcaccattctaggcagtaagtggcagttggcccccagactctctgctctaaacccctccctctgccactgagctcccccgagcttctgtcgccttggctgactgacctcatggagcagtttcttcggaccctgtgctgaggggcttggcacacagtaggtgctaatgcaccagttccctccattcagccagcatgtccagcacctgccaggggccagggctgatgtacaccaccaaatctctgggtgtgcatgcctgtctgtgtgcatgcctgcatgcgtgcatgcgttcgcctgtgtgtgtcgatacctgcccgtgtgcatgcatgtctgcgtgcatcccctgtgtgtggatgtgtcattgtgtgtgcatctgtatgtatgcgtgtctgtgtctatatgtggcagtgttcatggtatctctgtgtccctctatgtgtgtacatgtgtatatatcagtgtgtgcatctacatgtgtacctgtgcatgcaagtggatgtgtacatgagtgtagatacctgtgtgcatgcctgtgtgtgcgtgtctcaatgcttgccagcatctacgtgtgtccatgcatgtccctctgcacatggtgtgtgtgtacacactctgagtatacgatatggaggtgacaccagaggcccatcgtgtgtgaagccagtgatgaattctgttgtgtggccctggggacatgtcttccttctctgggcctctttttcgtcctgtcaagaagggcttaagtcatgctctaagcccatgaccaccccagaaggcccagctggtaattctggggtacacccattgcaggcacctcacccactccaaccctcggtggtgtaggaactggagacacagccttgtcctgaggctgggcctgaggacacaccaaccctgtgtcacctccttttcagcaaatggtggtgggctattgccaatttgtttgcaagtcatttttttgtcatatgcattatgaaaagtttcccagcatccagataagtacagagatttcattacttggacttcacattttgccatgtatgcatgctcttgtttattttcttctgaaatatttaaaagtaaattacagacatcatgatgttttgcctttaaatatgttgttctgggccaggcacagtggctcacgcctgtaatcccagcaatctgggaggccgaggtagaaggatcacttgagctcaggaattcgagaccagtctggccaacatggcaaaaccccatctctacaaaaaatacaaaaaattagccaggtgtggtggtgcatgcctgtagtcccagctactcaggaggctgagatgggaagatcgcttgaacccgggaggtggaggttgcagtgagccaagattgtgccactgcactccagcttgggtgacagagtgagactctgtctcaaaaaaaaataaaaaaataaaaaaacagaatatatatcacagtacaatctaggatcacatattcaatcggattctgccaggctcagtggctaacactgtcatcccagcactttgggaggctgaggcagaaggatcgcttgagcccaggagtttgagatcagactggacaacatagttgccctgtttccaaaaaataggatttaaattggattctgtctttgttatttctcgtagtctggactagcccccctacacctgtttatggagaaaccaggagatgccattgctgtgtgtcccatggtggcgactgggctcattgctgccttgtggtgtattttagcttgttcctctatctggtgaattttcctgcggaaaattctgcagaaaaatctgcggaaccattttttgctggaacgcttgacagctcttgcatacacttgaaaacacgtcacattctaggaaacgtggtgattggtgctcctgtgagctgctggctggcatctgtcagtggtggagagctctggggggtgagggggcacctggttgagccttgtctcctttggcctcccagcctctaggccaggaggatggcaccgagtgtgcctgcagtggcctcttgctgaatggacacttgggtgggtggcttgtgcatttttgtcaggggctgctcagcactcacaccagtccttgggaaggcctgggtttgggggcacctctggggaaggttcctggagcttcctttgctctgtgagaaacctaaggagcctcagagctgcagatgaggaaactgaggctcacatggtgccacctcttgcccgagagggtcagagcaggaggagagcccaggtctggggatagatcttgtgtctccagaggtgccttgtctcaccatctctgctgggctgggaagaggttgagggagcagagaccctggccctgagctgcagaattctcgagtgtcagaggcaccccgagctcctcctttggaagacaggagctggggcatggccaccaccccagcaggtgtgccaggtgggcaggacactcagccgggggcgtccccttcgtttccccagaggatgcggctgtgaaggggcggctggtggaatgtctggagactgtgctcaacaaggcccaggagccccccaaatccaagaaggtgcagcattccaacgccaagaacgccatcctcttcgagaccatcagcctcatcatccactatgacaggtgcccgcctgggcctatcagggcctgatgcctggggccaggaaagaggggcatggaggcccggactcctgagtcctaggcagagggcagggaatcttgacttttaggtagggtaggaggaggatggggctgtgaagtgtcacctgtgaggttggtgctggggcccttcctgggggcagaattgctaggtatctttctctgggctcaaaggcccagttgtctgggtcactggaggtgcagtactgcgatgcaaggccggcaaggttaagacctggatccttgggggctgtgagatgggtcagctggggcccgagtcctccaccttctcctgtcagtttctctcaccatccctctcttgtggcccctgctggcagtgagcccaacctcctggttcgggcctgcaaccagctgggccagttcctgcagcaccgggagaccaacctgcgctacctggccctggagagcatgtgcacgctggccagctccgagttctcccatgaagccgtcaagacgcacattgacaccgtcatcaatgccctcaaggtgtgagcccttggagcccaccccgggcctgccacccccctcagaaagaccagaggctcagaggcccttgggtggccaaccctgtgccaacagggagtctaaaacacacctgggctctgctctccgccctcagacggagcgggacgtcagcgtgcggcagcgggcggctgacctcctctacgccatgtgtgaccggagcaatgccaagcagatcgtgtcggagatgctgcggtacctggagacggcagactacgccatccgcgaggagatcgtgagtgctgtggggtgcgggctggactcttgggtctgaggcaggaggtggctgggggcctggattcctaagtctaagggaggaggggctggggcctggactcctgggtctccagatgggggcagtggtgagcccagatccaggtgagtgaaagcccgacatggcctgcggcacactctctctcacacgccccggcggcaggtcctgaaggtggccatcctggccgagaagtacgccgtggactacagctggtacgtggacaccatcctcaacctcatccgcattgcgggcgactacgtgagtgaggaggtgtggtaccgtgtgctacagatcgtcaccaaccgtgatgacgtccagggctatgccgccaagaccgtctttgaggtcagcatccctgaccctgaccctatgaccccacgacaggacctagaggcagagcaaggatggccggggccgtggcgcctgccagcccgcagccaccctccttctcctgcactgccgtgacctcaaaatggggcctctgcctctctgggccaacccaggggacccagggctatggtctcatgggcctgatgtgaggagtccccagggcatgggcatggggcacccagtgtgcagtcctggcccccggatctcggtagtttccctctgccccaggaaaggggccccacacagtcctgttttttgtttgtttgtttgtttgtttctggagacggagtctcactctgttgcccaggctggagtggggagtgagtgccgtggtgcgatctcggctcactgcaacctcggcctcccagcgtcaagccattctcctgcctcagcc[132 bp omitted]cggcctcccaaagtaccaggattacaggcatgagccactgcttccggcccacagccctgttttacttcctgtgtgagcttgggcccgtcactcaacctttctgtgactcagtttcccacctataaccccacctgcagcagagctttcagtgttccaccagtcagtaggtggctgcacccaccgatcccggagagggcgctcattgttgtcctctccacgcccttccccaccccactcaggcgctccaggcccctgcctgtcacgagaacatggtgaaggttggcggctacatccttggggagtttgggaacctgattgctggggacccccgctccaggtgagggagcctcagcctgcaggggagaacacacatgcttctgaggggtccagggcttgggggatccccaggggtctcagggcaggcagtgatgggctcccatcctctcggcctccaccccaatccacctagcagggtaagaaaggagcttagtcccaggatcgtggacagagtgtgactgcggcccctgtctggtgcctggggagggccactcccctccagcagcttggggtcctgggacgggtccatcctagggaggggcacctctcgagggggtttctgggagagggcagtggaacctggccccgctgacacccactcctgcacacagccccccagtgcagttctccctgctccactccaagttccatctgtgcagcgtggccacgcgggcgctgctgctgtccacctacatcaagttcatcaacctcttccccgagaccaaggccaccatccagggcgtcctgcgggccggctcccagctgcgcaatgctgacgtggagctgcagcagcgagccgtggagtacctcaccctcagctcagtggccagcaccgacgtcctggtcagagccctgtccccccaccccacccctcttgcacacccccttcccgccctcccctcctcctgacccgaactgaccttccccaccccgaccgcgccaggccacggtgctggaggagatgccgcccttccccgagcgcgagtcgtccatcctggccaagctgaaacgcaagaaggggccaggggccggcagcgccctggacgatggccggagggaccccagcagcaacgacatcaacgggggcatggagcccacccccagcactgtggtgagtcccctggggtgggccctgccagggtgcctggggctgggtcctgccgggcgccgcctgtcctcaccgtgacctgcgcttcctacagtcgacgccctcgccctccgccgacctcctggggctgcgggcagcccctcccccggcagcacccccggcttctgcaggagcagggaaccttctggtggacgtcttcgatggcccggccgcccagcccagcctggggcccacccccgaggaggccttcctcaggtagcaccccctgggcccgggccccttctcgcggccacccccagggctgtcccttctcggcctctgtccccgttttccctgagcccctcccccgcccccgactcgctcctctctccatcctgatgccttcgccagccctggctgctgcctcccctgccccagcctccctgctcacgccctccctctgccactctggactccgccgaccctggccacccttcgttgtctcctttcctgtcaccgtttctcagcctgctcttccttttctccttctctccttccctcttccgtccctccctctctgtctctcttctgccctctcgctgcctatgtggaattggctgcctgccacgcctgtcttctcttgtctgctctgggattggatggctcagcgagctggagccgcctgcccccgagagccccatggctttgctggctgacccagctccagctgctgagtaaggggtggcctggggtgggaggtcggtcgggggggcggactcgggtgtccccagggagagttaggggactgggagccctcgtcaacgggttcctgatgagcagcagaggcagggacttggaggaaagggaaacttggtgtctgccgatgcgggggcacgggccagggttctattcccattggaggccactgctggatggatgcgaggttcctcgaggctctgtgaggggtctggatatgtggttctggggttctgtccttagggcttgttctcgcactcaatcgctctgggcctttgcccctccccaccaagttccttcccatctcactctgctccatgcctccagcccaggtcctgaggacatcggccctcccattccggaagccgatgagttgctgaataagtgagtcctgggagtggtgggggaggggaacgggacaggtgcggagcccaggccaggtgcagacaggcacccccgtcatcttgcgccccctgccccctcaggtttgtgtgtaagaacaacggggtcctgttcgagaaccagctgctgcagatcggagtcaagtcagagttccgacagaacctgggtgtgtcccgggggactgtgggaatgggtcggagggagaccttggggaaggggtcagagggactcagatggagctctgcctcccccacctactgcaggccgcatgtatctcttctatggcaacaagacctcggtgcagttccagaatttctcacccactgtggttcacccgggagacctccagactcatatcctctcaggcccggcccagcctcctgcctctccacgtcggccttcctcaccgtggggaagccggctgacccaggtccacacttctcttcagcctctcttgggcacgcaattagttctctgagattgagtgtctgcatctgttaagatgggggtgggattccttcccccaggacaggggatgacagtgaagtggtgtgtgggaggctttacttccagaactccacctgctccaggcctcattttgtccctgtctggcaccttccgtgtcctgccatcgtcctccactgggctccatgtcatgatgccagcaccgcctgcactcaggagccaggcctgcgggtccagacgctgatcaggcctgatctgggctgagtcactttgcctctctgggctctcctgtccccgctgtgaagtgtatgtagaccctcctcttcctcatagggttattgtgaagatcagagtgtctggaaaaccctggaagggcggctggaggtatcagtcccccctgcccgttctctgggcctccattgccacattcatgaaattagaaaagctcgacctgaaaactccttctggccgggcatgggggctcacacctgtaatcccagcactggcaggctgaggccagtggatcatttgaggtcaggagttcaagaccagcctggccaacatggtgaaaccccatctccactaaaaatacaaaaatcagctgggtggtagtggcacgcgactgtaatcccagctactcaggaggctgagacaggagaatcgcttgagcctgggaggtggtggttgtggtgagccgagattgtaccactacactccagtctgggcgacagtctcaaaaaaaagaaaaagaaaagaaaaaattccttcttcggtcgggcacggtggctcacgcctgtaatcctagcactttgagtggccaaggtggttggatcacgaggtcaggagatcgagaccattctggctaacatggtgaaaccccttctctactaaaaatacaaaaaattagccgggcgtggtggtgggcgcctgtagtcccagctactcgggaggctgaggcaggagagtggcgtgaacccaggaggcgaagttgcagtaagccgagattgcgccgctgcactccagcctgggcgacagcgagactccgtctcaggaaaaaaaaaaaaaaaaattccttctttcataatttccagaggctcgtgcaggcagctcagtggaggcagtgacaaaagaacatgagacccaggccttcccagtgggctactgacacggatgcagatgatgataacactaattgctaccatctttgtgtacttaccatgtgccgggcacacagacaagtacttgtgatggattcttttcttttctttttttaaatagagttgaggcctcgctatgttgcccaggctggtctcaaactcctgggctcagtgatcctccccaccttggcctcccaaagtgctggattacaggcgtgagccgccacacccggctggattatttcatcaactcctgaggacattttacacatgtccttgtgttgagacagggcctcactcacccaagctggaatgcagtggcatgaacactgctcactgcagcctcgaacttctgggctcaaggcatcctcctgcctcagcctcccaagtagctgggactacaggtgcacatcaccatgcctggctaatttttttgtagagatggggtcttgccatgttgcccaggcttacacatgtccagaggctaagagaggttaagtggttgcccacagccactcaggtggttaagagctgggattcaaacccaagtcagcctccagagctaatactattatgtctcagtgcggtgtgacattgtggaaggccaaaggaggcacctagggggcgcctcagaggtttccatagtatgaactttgtagttgaaccttgtaggattgagtccaggattgcaccatggggtccctcaaagacctgcaggcgggagctgccgggagctctggggttcctgacccagacctcccgggggcccacctcctctgtctggcttccttgactcctggcgggcacagctggctgtgcagaccaagcgcgtggcggcgcaggtggacggcggcgcgcaggtgcagcaggtgctcaatatcgagtgcctgcgggacttcctgacgcccccgctgctgtccgtgcgcttccggtgagtcaggtacggcgcggccggtgggcggagcctccggggtgaggggcggggcctaatggagcctccctttcacctcatcaggtacggtggcgccccccaggccctcaccctgaagctcccagtgaccatcaacaagttcttccagcccaccgagatggcggcccaggatttcttccagcgctggaagcagctgagcctgtgaggggtggggagggggcggagccaaagccgcgcctctgggtgggcgggtcgggccgtccaggtccctgacttgaaccttcccggtccccagccctcaacaggaggcgcagaaaatcttcaaagccaaccaccccatggacgcagaagttactaaggccaaggtgagagaccgcgggcgtgtttgccggcctatggctgctttgcttctctgagcctctgttttcccatctgtaaagtggggccaattcccatccccaagggttttttgggatctgggatgccactgtgtggtaactaacagctctggcacactctgacggcgccccccctcctcccagcttctggggtttggctctgctctcctggacaatgtggaccccaaccctgagaacttcgtgggggcggggatcatccagactaaagccctgcaggtgggctgtctgcttcggctggagcccaatgcccaggcccaggtgagtgctgctgtgggaggcctgaggccggcaggaaggccgcctgtcatctctgcgtccacccttcctgcctcactgttctttaattcacgtccccactttgaccctcctcctctcacatttctttgtccacttttactcctctttatctatcagtttaatctcctgtctccaacctctggtgttcctctcctcttcctgtccctccctgatttctacctttccatatcctttccacctttctctcatcttttataattttcttcctctctggcgcctctgttgatttcagtcttacatttttctctcctgtgtcttgtatcacctttctggcccctttatccttccttccttctatctcccttgggtcccgacttccctgggctccccatctcctctgagttctgcccccaatgcccccacccagatgtaccggctgaccctgcgcaccagcaaggagcccgtctcccgtcacctgtgtgagctgctggcacagcagttctgagccctggactctgccccgggggatgtggccggcactgggcagccccttggactgaggcagttttggtggatgggggacctccactggtgacagagaagacaccagggtttgggggatgcctgggactttcctccggccttttgtatttttatttttgttcatctgctgctgtttacattctggggggttagggggagtccccctccctccctttcccccccaagcacagaggggagaggggccagggaagtggatgtctcctcccctcccaccccaccctgttgtagcccctcctaccccctccccatccaggggctgtgtattattgtgagcgaataaacagagagacgctaacagccccatgtctgtgtccatcacccactgctaggtagtcaaagaagtggggtgagggcatgcagagtgtgggtggccaggcttcgcagcccatgggtgggactctggggagacagcagcagcagcagccgccgaagccccagctgcaaggccaccagacgcactcctgtgcctggttcctcagtccccaacaccaggtagcaagctctgggcagctgggcctggtagacctcatcttctgtcttctctggtggccctggctctggagaaagaacagggggcactgacatgacaagtagcatgctaacctttgcaagccacaccacatcctgatcccaagttctgaacgcgtggggtctctgaacacaggttttgggagcctcctgccaggggagggcctcggggctctagctggctgtcagcaacttgaagaccacaatgatgtcactcagctcaccctcttcctctttctcagccttggcccccattttcctggagaaactgtgcagctgcaggtgatcctcttagcaatacacatggcgaacacggcagcaacacaggagctcctgtagccttttccaggagcccacccgccccactgtacaaggcgggtggagggaaacaggcaggggccagtgggaggtggagtcgcacagctaagaaggggtgcagcccccgagttggagctcttgaccactgtgctgcattcatccgggcttcactggggtcacagcgccatcccaggtccctttctttgtctttctgggcccttaagggttctacgacaatttttccgttctaacccagaatcttgtgaaatcctcctccataccctcagcctatcagcaaagcctgtgcttttggcagttgtgcagagcgctggactgtgtggatatgggagcaagatcccctgtgttcaaatatggctctgccactcatgagctgagcctcagtttcctcatctgtaatatgggaatgatgaggtaatgggatagtcctcacctgtgaggatgaagtgatttcattctttcattacgtgtaaaggcactgggaagaggtgaggtctcagtgttaactattgttgactatgatccaggagattctgaagccaggcggggacctcccttcccctcccttcccatctgcatcaatgctcagatctcaaggaaaaccactgccctatggcccagtgcatactgggttcctccggatcctccaaccccacctcctactcccattttgtgcgacctgggactcagtgtccccgcctgcgcagtgggagcactgtgccttccgctgacctggtgggaagtgcgtggaggtgaccagggtatagaagtttcggaggaggcgccggcgctgttctggtgaaggctctgctgggaggaaaaggcggtgatgcagagcgcctccccggcccacgcccctcctacccctgcccctgcccctgtcctcagtcacctttatcccccaagggctccacggtgaagaggcagcgcttcagttccaggtggaggagcagcagcctgtgggaaagggaagggaatgtcatggctggggaagaggacatgacccccgacccactccctccatccgagccctacccgaggatgtctgtgtgaagggggaagccactgggcagcgcccggggtcccaacggcagacaggcccgcaacgggtccagcagtggctgccaccagcgctccagaagctgcagggggcgtggtcattgtgaggtcgtcatgggaaggcggggccggcgggggaggtcggggggtgtacaaggataggggcgtggtcaatcgggaggggcggggcctgcaagaagagtggagggcggagggcagaagggactggggaaggggcgaggcctggaagaatagaggcagaggcgggagcggccgatcttggcgggtaggtgaatgactggagcgcagtccagaagaggcggggctggggaaagatgccgctggcagggcagggtggtggggaagggccctcctggtagcgggtgtcctaagagcgaaagcgggacgtggcgcgggttcacctgtggatacaactggctgaggggtgggctcggcccgcagagtagacacagctccaggctcggcagcagagtcagggtcaggagccggtgtgggacctgaagcagggcacaggctggggctcatcgcggcccggcccctttccatcgcagatcccgcctcctcgcgactcggcccccaggtcacatccctccgtcggtgcccgccacccactcaccgtggggctcccgtgcggcaggtacaccgggtagtcgcgagcggtctgcggcggcagggaccccaccagccaggggagcagcacggcctcgggcgtccccagccgccaccaaccctctgttgctgccaccacccggccggacaccaccagactgacgaaggtcgtgcccgcggcctcagcgaacccggagagggcttcctgggtacgggaggcaggaggactgggagtcagcagacaagcgtagggggtggcagcgacttcccagatgggcagggaatggggagaaacccacagccagccccgagctcgcgcagtggccatgctcctacgtctcaccctctctgagcctgagttccttcactttcatacgaagtcacatccccaactcacactgtgaagtctgtgaaatctgattaaacatctagcctgggcgggcaaactgaagctaataatgtaaccgcagcagctaccgttcatccaggcctgttacatgccgagtaggcaccattagcaacgtagagaagccaagtcacctgctgagagtcacatgcctgggaggccgccacaccaggcaagtccacaagagcagtatttaagtagaggtagctagagatctgagaggcaggaggaagaacatgcactgaggttggaaacttgttgggatctcaggactgtgaggtagctgggtggaagtagactgtggatttagcaacaggttagggggtgccaggtgccacaggccttcaaacaccaggctgaggagctgggaccttgtcctgggggaggtggaggctgccggagggctgtgagcaggaaaggggcagagccagctctggatatagtagggttcttctggtggccgggtgtgatggctcacacctgtcatcccagcactatgggaggctgaggcgggaggactgcttgagcccaggagttcgagaccagcccgggcaacttaatggaaacccatccccaaccctagtccatctcttaaaaaaaaaaatagctgaatgtcagccgggcgcggtggctcatgcctgtaatcccagcactttgggaggctgaggcgggtggatcacgaggtcaggcgttcaagaccagcctggccaacatagtgaaaccctgtctctactaaaaatacaaaaaattagctgggccaggcgtggtgaccagcgcttataatcctagctactcgggaggttgaggcaggggaatcgtttgaacccaggaggcagaggt[134 bp omitted]gagatgagaggatcacttgaatccaggagttcaaggctgcagtgagctatgactgagccactgtgctctagcctggatgacagagcaagaccctgtctcagaaaagaaagaaagatggcccaggcgcagtggctcacgcctgtcatcccagcactgtgggaggccaaggcaggtggatcacctgaggtaagaagttcgagaccagcttggccaacatggtgaaaccctgtctctactaaaaatacaaaaaattagccgggcgtagtggtgggcgcctgtaatcccagctgctcgggaagctgaggcaggagaattacttgaacccgggaggcgcaggctgcagtgagccgagatggtgccattgtactccagcctgggcaacaagagtgaaactacgtctcaaataaaaagagagaaagaaaagaaaaaagaaaagaaagagaaagaaaagaaaaaaaaaaaagaaaaaagattcttctgggaccaggtggggataggactggaagctgagaggataggaggaggttgggacaatggtccagaagaaagaggatgaggactgagccagggccagcagaacaggtgtaagagtttccatagcatccccagtacctgcaagagggacccctctggaggaatcacgcagtccacacactgggtcaggtccccgatgagctccgagtcccccaggaagctgtcgatgaggcaataactggcctaggagaggaagaagggaccagcctaggattcaagtgggcccagggtcagacaaccaagaacctgtgggaccaggctgccccaggggctgctgggaactgtagttcccaaatggcagtgcccaggtatcctaacttcccaccctcatgtcctgcaacctcaccctcaagtccttcttcagtctctccacgttgcggatattggtcagttcttcaagtcccacaagaaggacctagaagaatcatataggagaggatgggcgaggggctgggacttgaactcctgggtctgaaggaagagggggctgggactcccacttctgggtctggggactggggagtcaagattcctgggttctggccgggcgcggaggctcatgcctgtaattccagcactttgggaggccaaggtgggtggatcacttgaggtcaggagtttgagaccagcctggccaatatggtgaaaccccgtctctacaaaaaatacaaaaattagctgggcatggtggcacgtgcctgtaatcccagctacttgggaagctgaggcacgagaatcgcttgaacctgggaggcagaggttgcagtgagccgagatcaagccactgcactccagcctgggcaacagagcgagactccgtctcaaaacaaaacaaacaaacaaacaaaagattcctgggttctgaggaaggaagtgttggtggtctgcactcctaggtctgagggaaaaggatgctgagatctcagattcctggtctggggagaaaagaggactggtgagtctcaccatggctccaaacaccatttggagtagtctctccagcctcagctcagagatgcccacctcagatgacagaacaatgagggtgatgctgtggaatggaagtgagaagaatgagtcaaggcctggggaatcaggaaggggtatgttggagtccgcccattgatcctagaacaccagatacatcctctctcagaccaacctgcctttcttatagagaacatcagggatcaaagagggtaactggcttgctaaagatcccatagccaaattaacagctgcttttagagagctggaaggcctccggggtcatcttcaacagggactatcacccaggccctgtccctgtcccacgttccctcctggggacctgtcatggaagcttttccacaccacagtcgtgttctcggtcctcgcagagctcagctgcacctccagattctgcccaaacatgtggactccattgagggaaccgatgacagagaacgggagctaaggaggggttagggacatcagacaagagcacccccccatccccttcccccttaggacccaagtgtgccagctcccagccccatcctctttccatatgacctggcagtgcctctttggggaaccaggcttattggtccattgcctcctcggtcctacaaattcaacactgaaacttccccagcccctactgccttgaagacccagagtcaaaacaccgaacccccttcggtttagatacaggcgtccaaggccccacctgctgacgggcgggggcgccgccgcgactgctcctgcagaatagggggaccccgctggaggccgcgaggcacagcagatgcacagtgccgcccgtcccctcctcccccatttaggactcccaccgcggtccctcacgtggggactgtcagtgcgggtcttggagcatggcggtaatcagagtaactcggcctgtggtccggagccgccagagggcgagatggggagctgattggaagaggattaacttcccgccttcttcacccaactcaaacagaccctcaaaccctattcaggcacctcccccaaacccattaggttctcttccgccctagccggaagtcacggtacccctaacaaagatggcggcaaattgaatttgcaaagctttctagtttctccgaggaggtaaagagaaccaagaagccggattgaagatgatgactgcgccaaggcgttgcctagccaccatcctgtaggctttgatgatttacattctaaacggaaaaaacagctgtgcccggatcaaagattgcgatggtcccaaagcattgcctagcaaccacattccctgtaggtttccagtatatagtagtaaacaatgtgccctactcaaagatggcgaccgtggcggggcgttgccaagcaaccaccattcagcctgatatccattccaaggctgtaaacagctgtgccctgctcaaagatggcggcacgtcgaagtccgagcaccctccttggggcgaaatcgagaaaaacaccatctcccctacaaccttcgagggtggttgagtccagcgatcgttgcctagtaaccactaaaaaaaaggttgtttttgttattagaaaaaagaaaacaaggaaatcctttattttccagaataataaaaataatatcatttctgtaatgaatttatacatgatagcataccatgtaaaatgtgaaaaatcccttccccaatttttttcctaaaatacagtttaacgtagactattcatacgttttcacaaagatgatcaatatactaacatttccacactttcttttttgccatgaaaaagtatgtctatttcatcttaataatgtatttttataatctattttatggatgtgacaaattgatttgaccaattctgtattgatgtacattaggttgttgaactcctccagactagccaactagtgctgggacagcattttactgactttttaaaatgcccttatgaatatttttattattttacacaggcagcatttacttgtaatgacaaaagtatttatgattcatttttcccttcctcttccttcttgcagatcagcccatctttctagcataatttttaattttcctacttcctaaagtacatctttttctcttttttttttttttgggagaggggacagggtctcgttctgtcgcccaaggtggagtgcagtggaaccatctcggctaactgcaacctccgcctccaggattcaagcgattctcctgcctcagcctcctgagtagctgggattacaggtgtgcccccaccacgtccagctaatttttgtagtttttgtggagacagggtgtcgccatgttgcccaagctggtctcaaactctttggctcaaatgatccacccacctcagcctctcaaagtgctgggactacaggcaggagccaccatgcctggcctaggtaccattttaatcttccttcttgcctattgatattttttttcctttctctggattacttttatcttccttacaactttattaaaatgttagttacacaggcataaaagagggggctgctctagatgaaaagaaacttgagacataatgtctaaatatgtgtgtggtctttgtttggatcctgatacaaataaaccaactgtaaaaacacattttgagacaattggaacgtttgattacacacttactgttggatgatactaagaagttaattttgttacaggtaacaatggcatactagtaatgtaagaaagtgttcataaaattggaaagatgcctgccaagcacacaggagtaaaatcatatgattgtatggatttgaaggcttcagcaggccaggcgcggcggcttacgcctgtaatcccagcactttgggaggccaaggtgggcgggtcacctgaggtctggagttcgagaccagcctgaccaacatggagaaaccccggctctactaaaaatacaaaattagctgggcgtggtggcgcatgcctgtaaactcagctactcgggaggctgaggcaggataatcgcttgaacccaggaggtggaggctgccgtgagccgagactgtgccattgcactgcagcctgggcaacaagaacaaaactccatctcaaaaaaaaaaaaaaaaaaaaagcttcagcaaatgagactgtctcaaaaaaaaaagggcttccgcaggctcactgcctataatccgggcactctaggaggccaaaacgggtggatcacctgaggtcaggagtttgagaccagcctggccaacatggtaaaaccctgtctctaacaaaaatacaaaaatttgcctgcgaggtggcacacacctgtagtcccagctactggggaggcagaggcaggagaatcggtggaaccagggaggcagaggctgcagcgagccgacactgcgccactgcactccagtctgggcgacagagcgagattttgtcaaaaaaaaaataataaaataaaaaaaaataaaaataaaaataaaagataaaagaaaaatagaaacccaataaaaaataattttaaatgataaaggtaaaaacctttatcattaggctttctgtaagtacttttcaattggtgattattattattattattacttttttttttttgagacagcgcctcgctccgtcccccaggctggagtgcagtggcgcgatctctgttcactgcaagctccgccttccgggttcacgccattctcctgcctcagcctccggagtagctgggactacaggcgcccgccaccacgccccgctaatttttt[261 bp omitted]tgcctcagcctctcgagttgctgggattacaggtgggcaccacgacgcccagtgatactgacctcgtgatgcgcccgcctctacctcccaaagtgctggaattacaggcatgagccatctcgcccggccgaagattatgttttaaaatatttactggccattcaaaattttgtgtgtgtgtttgtgtgaaactagtcaggtttctttttatttatttatttttattttttttgagacggagtctaactctgccgcccaggctggaatgcagtggcacaatctcagttgactgcaacctccgcctcccgggttcaggagaatctcctgactcagcctcccaagtagctgggattacagacgcccaccaggacggctaatttttttatttttagtagttagaaggagtttcaccatgttggccaggctggtcttgaaccccttacctcgggtgatctgcccgccttggcctcccaaagtgctgggattacaagcgtgagccacggcgtccggccctggtcaggtttctttctattaaaacaaatataaagtggcagggcacgatggctaacacctgggatcgctttagccgaggagtttgagacacgccagagcaacacagtgagaccccatctctacaaaaaatttaaaaattagctggaagtggtagtgcgcggctgtggtcccagctgctccacaggctgaagagtggctccagtgcgagtagaggctgccgtgagccaagattgggccactgcacttcaacctgcacaacagaaagagaccctgcctcaaaaaataaaaattaaaattaaaagataatagtaatgaagtgtttctatttttctatattgttattcatcagtaagatttatttgcgtagtacatttctgtcaacaaacacgctagaaagattttcccagttggccgtatatttttcaacttggtttatacagtcttttgggaaaaattaatgaagactacgttttctaactttgctgtagtgctaagaaactccatggcagtcattaagattttttcccttcagatagttttcgggtttcatttgttgcacttacatttttaatccacctggaatgtatttacgttctaagccagtttctggctcctctcccagaaaacaacgctcaggtgttgcttagcaacccgcacttggtttggtgttcggcttcttttcgggggggaaaacaactgccctcccttccaagttgaggacgaccttaaagcgtcgcctagtaacctcgtttccgccgatgtgattggatccttctcgcgtccctcccctagtccccacgcccgaaagaacagaaccagaaacttaatctaacggttacaaaacaagggcagcgggcccggcgcggtggctcacgcctgtaatctcagcactttgggaagccaaggcgggcgaatcacttgaggtcaggagttcgagaacagcctggcccacagggtgaaactctttctctactaaaaatacaaaaattagcggggcgtggttgcgggcacctgtaatcccagctactcgggaggc[134 bp omitted]aacgaaaacaagggcagcgtacgcgttgcatagcaaccaggtctcctgcccctccctttgagacaagaggcggacctggacgccccgctcaaagatggcggctgactgagccgctttcaatttatttagcttttgacaataattccgtctaacccatcaggcccctagaagggctaactatgccctttctgagtcttccacgcggtgggggcgaaggaggatggagctagaacgaagcctcagcgcgtgccccgcacaaacatggcagcattcccagcagccctaaaccgcccgacgcgagcgcgcgcgcggcgcaggcgcatttctgctcattccgcggcgtcggctgcggctgcagtggtggtggcgggtaccgcacggggtatggtccccgggtccgagggcccggcccgcgccgggagcgtggtggccgacgtggtgtttgtgattgagggtacggccaacctgggaccctacttcgaggggctccgcaagcactacctgctcccggccatcgagtgagtgctgtttccgcgactctaaccccgccctcccacttcagtttcgcacagtttcttgcctgactccgacctttcacttcctaccctcacaggtattttaatggtggtcctcctgctgagacggacttcgggggagacgtgagtctagggactcctgggcctgagggaggaggggccgggggcctggactcctgggtctgagggagggagaaagggctgggcctggactcctgagtttgagggaggaggggctgggggtctggactccttgttctgagggaggagggcctgggggcctggactcctgggtctgagggtggaggcgctggggcccggattcctgggtccgagggaggagggagctaggggcccagatccctgggtctgagggaggaagggctgggcgtctggactgctgggtctgagaaaggaggagctgaggcctggattcctgggtctgagggaggaggtgctggggcctgggctcctgggtctgagggaggaggggccgggggcctggattcctgggtctgagggagaaggggctggggccgagattgctgggtctgaggaaggaggaagctgaggagttcctggttctggaggaacgggaagctgggagccctgattccttctctaagggaaaagggaattgaggtcccagattaaaagttttctgtcctcccctcccagtatggggggacccagtacagcctcgtggtgttcaacacagtggactgcgctcccgagtcctacgtacaatgtcacgctcccaccagcagcgcctatgagtttgtcacctggctcgatggcattaagtgagctttcccccacttggggtgggttgctggtccctgtgaggggccgtgaatgagtgatggcttggggtggttggtgtccccgtgagaggctgtgaataagtgatggcttggggtggttggtgtccccgtgaggggctgtgaataagtaatggcttggggtggttggggtccctgcgaggggccgtgaatgagcgatggcttgggtttgagctgcaggaaacatctcatacattaagggattgaaaggactttgagggtgattgtgtttttgtcagaagtcacttttgtggtggcttctgtgtgctcagcaatgttgccatcagtttagaagtaggaaaaaccttcccattcagggaggcctggctgagctccagcagccaccttgtactccctgtgtgattgtcccctttctgtcctctctttttccgtctacccctgtcctccttttccagatgggtacattgtagcctcagtgcagggggatgggtcagagccaggatagatccctctgtggcttgggtcagaatttttttttttttttttgaaacagtgtcttgctctgtctcccaggcttgtagtgcagtggcacagtcgtggctcactgcaacctgtacctcctgggttgaagcgattcttctgcctcagcctcccaagtagctgggattacaggcacacgccactatgcccagctaatttttttttttttttttgtatttttagtagagacagtttcactgtgttggccaggctggtctcaaactcctgacctcatgtgatctgcctgcctcagcctcccaaagtgctgggattataggggtgagccactgttgcgggattcaggacgacaggagagagccctcgggttaaagcaggagaatctttcattgagtgcactcaggcccaagccgactcacgtccaaagacggcccagaacaaaggtagcacttgacttttatacacacttcacaaaagggggtgggctagcttgaagcaagcttacagtggcgtgacagcagggatacagaggcagaacaaaaacagttaatcaaattgttgtaacaggtttataactcaggattgcacataaccgttgctatgcaacccagatgtcccttatctaggttagcctaggcacgggcttatcccataaccttcactgtggtgcccaggcagctcaggcttctcatgaccttcgctgtacttcttagataaaacagaatacttgaagtcatgagttacagagaacaggaatctataaactcattccataaaacaaaggaaaatttgttttttcttctctctatgttgagggagtgctgggagagtctccaagagcactttagatagtattatcaagacttttcctgggtctgggctgtgcccattgctgcctctcagacaagtcagcctaatacatagaacttatttctctttttaattttttttctttaatttcctgcctcaccaccacgcctggcgctggatcggattttgatagttgacattgtagagtctggagtcaggcagacgggttaaatcctggctcttccagcacagaactaactctcagacccaggagtctgtcccctctgtgcctagtatctcacttgtgaagtggggatgtggatagtacttgtattagtatttcattgtattacttattcttagctgtataatagattaccaccaaataatggctgcatactgcaaacatttattatctaacgcagtttctgtgagtcaaggacacaagagtggcttggctggatggttgggctgagggtctcacaaggcaatagtcaggaggtcggcaggattgcagccatccaggggtttgactggtggtggggaatccgttcccaaggtggcgagtctgtggctgttggccacaagacctctccacagggctggttgactgtctaacatggcaactggcattcctcagattgagggacccaatagagagagcaaagaggaagccccaggcctctcttgtttttgaggaagggtctcactctgtcacgcaggctggagtgcagtggctcagtcacggctcactgcagcctcgacctcctgggctcaagctcaagcgatcctcccatctcagcttcccgagtagctggagtagcagggacggtagccaaa[137 bp omitted]catggtgaaaccctgcctctactaaaaatacaagcaatcatcctgccttgacctccctaagtgctggagtgctgaaattacaggccttagctgggcatggtggcgcatgcctgtaatcccagctcttgggaggctgaggcaggagaattgcttgaacctgggaggtggaggttgcagtgagccgagatcacaccattgcactccagcctgggcaacaagagtgaaattctgtctcaaaaaaaaaaaaaaaaaaaaattttgtagtggcggggcacggtggctcatccctgtaatcccagcactttgggaggccaaggcgggcgaatcacctgaggtcaggagttcgagaccagcctggcc[221 bp omitted]tgaggcaggagaatggcgtgaacccaggaggcggagtt[134 bp omitted]actcaggaggctgaggcaggagaatcacttcaagccaggaggtggagagatcgcaccactgcgctccagcttgggtgactgactgactgagaccctgtctcaaaaaaaaattgttttttttgtggagacaaggtcctgcaatgttgcccaggctggttttgaactcctggtctcaagtgatcctccacttcagtgtccctaagtgctgggattagaggcatgagatgctgcacccagaggccccactaggctcttt[145 bp omitted]ctcccgagttcacgccattctcctgcctcagcctcctgagtagctgggactacaggtgcccgccaccacacccagctaattttttgtatttttagta[156 bp omitted]cccagattggagtgcagtggtgggatcatagcttgctgcagcctcgacctctcgggctcaagtgatcctcccacctcagcctcctgagtacctaggactgcaggtgggcaccaccatgcatggctgatttctttattttaattcttgtagagatgaggtcttgctgtgttgctcagactggtcttgaactcctggcctcaagcgatcctcctgccttgacctccctaagtgctggagtgctgagatcacaggcctgagctgcggtgccaagtccacttctgccatactgcatttggtgtgcagtataagcctatcccgttcagtgtaggaggagactacccagtgtgtaaatagcaagaggctggattgctgggtgctgtattgggggctgggtaccgcaacctcacagcgatgtttggagaattaagttagttgatgatgtttaatacagtgcctggcatgtattaagtgccgtgtaagtgtttcctaggattttgtgcctcactctcctggtttgcaaatggataatggtcgcgtgtatctccgtgttgttagaagatcacaggagctaagttgcttgctgtgtgtcgcttagggcctggtctgcagtcaaggttcattaaacaacacctgttcgtagcggccgttacctctgtatgcttctgcagcaggtgtttgttgagtatctgctttgttccagtatgtgcgtgcaagtgctgggtgcaggacatatagtgaaaaggtgacacagaagcttccccttcgcggtagctggaattcgtaggtaacacagagcagggtttctcatccttggccctagtgacactgtggacacagtcattccttgtagtgggggccgtcctgggtattgtaggatgtttaacatcatccttggcctctactcactagatgccggtagccccctcccaaaggtgtgacaaccaaaaatgtctccaggcattataaaatatcctctgggaagggggcgcaaaatgtattccatttgagaccactgggagagaccggtaagacagtcttgagtgatgttaaatggagacttcttgaggcccaggtccaagtctgatgctcctcaagtgcctggcagccagcacagggcctggtacacaggaggcctcgggtaaattctgtagaatgaatgtccagaatgcatttaatactaaccaccctggaagacactgcatagccttccagacccagctcaggtgtcttataccctgggaaaccttcccgattcttgcagccagatgcttcctcctctgcctccatgacctgtcacagccccacacctctggactgtgaatgtccaggtccctgggtgcttctgccatttgcttccagctggggcttggcacccacggggcttcaggagactggctgaataaatgaattagtatgtaatacaaaaacaacaaataaatagaaaaaattaaccaggcatggtggtgcacacctgtagtcccagctactcaggaggctgaggtaggaggatcaactgagactgggaggcagaggttgcagtgagccgagattgtgccaccgcactccagcctgggtgaaagagcgagaccctgtctcgggaaaaaaaaaaaaaaaaaagaggtggaaggaaaatagacccagtgtgtttcccataacattatgacaactcagttgttcattcatatgttcactcattaattcaacaaatgtttgtggaacaaatcgtcctgggcaccaaggagttagtgggcatgagataggcaaggtcctggccctcatggaactagtttgcctgggtgacaggccgtgtgtagggagcccttggtcatggccggatgctgttaacattcactcattttgacctcctggggctccaggcacctgttagccgatgaaagcgggcagcagagaccccggggaatgatactgggtagaacaaatgggagtaagttagaggacttgggaacaccaagtcagagcccacttgtgtcacctagggggcttttatttttattttgtgtctgccatatcaaggggtttatttggaatttatcataaacttgatattttagccatattttgcagccagccatagtgcttcttctgttcaagttttccacatttctttgacaaaatgtttattacatgtcgccctttgagcttgtagcacatgacttgtacttagtgttcaataagagaaacgcaagttttagcatctcaaactggttagtttatcacacttttcctcataagggttttgttttgttttgttttgtttgagatggagtctctctctctctcccaggctggagtgcagtggcatgatctcagctcactacaacctctgcccccgaggttcaagtgattctcctgcctcagcctcccgagtagctgggattacacgtacccaccaccatgtctggctggtttttgtatttttagtagagatagggtt[132 bp omitted]taattccagcactttgggagggtgaggaggcggatcacctgaggtcgggagttcgagaccagcccgaccaacatggagaaaccctgtctctactaaaaatacaaaattagctgggcgtggtgccgcatgcctgtaatcccagctactcgggaggctgaggcaggagaatcacttgaacccagaagtcgaaggtagtggtgagctgagatcgtgccattgcactccagcctgggcaacaagagcgaaactccatctcaaaaaaaaaaatttatcaccccaaagaggacaccccatatgcatgaagcactagctccccattcccccatccccccatccccagccagggtggttttggctcgagtcccagaaaggcccaggaaaatattggcttaatttcacctgtagcagaacagctgggtccagagttggttcaccccaactctt[152 bp omitted]ctacttaaaaattaaaaaaattagccgggcgtggtggcgggcacctgtggtcccagctacgagggaggctgaggcaggagaatggcgtgaatccgggaggcggagcttgcagtgagcggagatgtgcctctgccctccagcctgggagacagagcgagactccgtctcaaaaacaaaagctgttttgatggctaggaagaggagggctgggaagtgtgtggtgggttgggagcagcgcccgagtgccctgagagcaggaagaaggctcaggggctcagtgtgctcactggccgggccgagtgggactggaaggaaatcagtgcgagaactcaggcaggaagcggagagccccgctgcatggccctgccaggccaccagtgcactgagtactcagcagatggttcctaggccttgtgtgacctagggtcagacgccttggtgtctctcttggagggctgcacagggtgcggagagaagcttgacagctgcagtatcgggtgatctatgatgtgactaagggcaggccgtaaaattaggtggcatgtagggaaggcttcctataggagggcacaccaggatgggtgtcgtagtttagctggattccatccgggccggaatgggtgtgttccagcacatgcagagacctggatgtctgggctttgtcagttgagaggacctataggtgcgggcatggagcaggagagatggacggggtgcaggactcggaggcctcggatgctgggccgatgccgggccgagggcctgggttggttccagtcttgatggacacggttgggcctgtagacgttcattcacttagcctacatttcctgaggcctcacatgtgccccgctgtggtgggcaagcctgggggtaagagaggactcagaccccatccccgcctgtgggagaggtaggatcagagaccacacttcagggggacagggccctcaagaccctcagaggggtgctcggtctccacacacgtcccctgcagcaaaggtcagcctctcacgaccacgtgaccggaataatggtggcaaccacagctgcccttgaggagaggccatccccgggccacaacccatgtgggacggatgctgcgacgcgactgcagatcaggcggaggagaaacgagagtctgtgtgtgttagtttcccaggctgccgtagcaaagtatgagaaactggccagaagaatggaaattgatgtctcagggttctggaggctggaagtccaaaatccaggtggtagggccaggctgtctctgaaatcttacaggggaagggcccttctgcctttcctggtgcctgctgaggctgcatcacccgtcctcacatggcctctccctgtgtctctctgtgtccttgtgtcttccctctgtgtgtgtgtccgtgtccacgtttctccttttcacagacaccagccatagtggattagggcccgcaatttaactcgattacctgtgtaaagatctttccaaattaggtcaccttctgaggtactggggcttaggacctcaacctgtctttttgaagggggcacacttgaacccataagactaggaggacagaggaggcccccgtctctggctgggaaggtgaagtggggccaggactgatttggagcagacagcccagagaggggaggggacagcaggaggctgggcatggagtcagtcactccagggttggagtcagcacaggatcctaggcttggggtccccagccctttcccattccctcccagtcctcatgattaaagacaacaaatgtcggccgggtgtggtggctcactcctgcaatcccagcactttgggaggctgaggcaagtggatcatgaggtcaggagatggagaccatcctggctaacatggtgaaatcccgtctctactaaaaatacaaaaaattagccaggtgtggtggcaggcacctgtagtcccagctactcgggagactgaggcaggagaatggcatgaacccaggaagcggagcttgcagtgaactgagatcatgccactgcattccagcctgggcgacagagcgagactccatctcaaaaaaaaaaaaaaacacagacagcaaatgtcccctgtcctgtctgggactggtgctgtgctagcaccagggattgggtagggaactcagcagggtccccgtcatcccaaggtgcatagcccaggatagagtgggggacagcatgggagcaggctcttcaagcatagcctggggatggggatgatggcaaccctgggggctgaccgctctgcccctgcaggttcatgggcgggggtggtgagagctgcagcctcatcgcggaaggactcagcacagccttgcagctgtttgatgacttcaagaagatgcgcgagcagatgtgagtgccccctccacccaggccgggccggtctctctctgcctggcctggaaccactttgcctgtcgagtggttctacctccagcctcaccctgtagggcatgggctctgtgtccccaagcacgctgagccaggaggctgcaggtgtgtccttgggggacgcctggccagtgcccggtctcagcatccccatcaggaagcagtgccaactctgggtgtcactcctgcctgccctgcctgctgggtgacgtagagcacatcccagaacctcttggagcctcagtgttctcagctgtaaagtaggggcgttgcttctgattccatgtgaggcggaatatgtgcatctccgctggtgctgggtctgggttccttctcagggcctctgttgctgctggctccatgtcttctctctttcctggtagtggccagacgcaccgggtctgcctcctcatctgcaactcacccccatacttgttgcctgctgttgagagcaccacgtactctggatgcacaactgagaatcttgtgcagcagattggggaggtgaggactccagggtctgagggacgagggtctgggggcccggagtcttgggtctgaggcaggaggcactgagggcctggactcctgggtctgagggaggaggcactgggggcctggactcttgggtctaagcggggaggcactgggggcctggactcagacacagaatagtcacagactggtgaccagctttgcttactctcttttcgaaacagtctggctctgttacccaggctggagtgcagtggtgtgatcttggcccactgcagcctctgcctccagggttcaagcaattctcatgtttcagcctcccgagtagctgggattatagacgcccgccaccacgcccagctgatttttgtatctttagtagagatgaggtttcaccatgttggccagactgctctcaaactcctggcctcatgtgatctgcctgactcggtctcacaaaatcctgggattacagacgtgagcctccacacctggcccacttagtcttactgacaaaactagaacccagagtctcccggggcaggtgatacctggtttcagggtctcctgcctcaaagcccaatgggaattgtggttgtagggctggtgccgtccagccacacagcagttgtggtaggttgggggccggccccaacacccttatggagggggcccgtcatgactgctcggcccctctcctacagcgggggatccacttctccattgtgtctccccggaagctgcctgcgcttcggcttctgtttgagaaggcagcccccccggccttgctggagccgctgcagcctccgacagatgtgagccaggacccgaggcacatggtgctggttcggggactcgtgctgcctggtgaggcctgggcaccgtgcgcggggatgggggctcgacgtgtttccccagctccctctgacttggattttggatttctctcctttctctgcatcttgaatcccttctctctggggttggccatccctcctgctctcagttgggggtggctcagccccaggccccctccagtcaaagcagccagtccccctgcctcccgccgcaccctcaggtgccactctctcagcagccccccagcagcctctgccccccgtccccccgcagtaccaggtatggatatttccgggaagggacatgcttctggggacttgctggagccctggcccctggggagaaatctagttgcatgttggagcttgtgggatgatgggagtcccatgggacattgggaaggtgggactcttggggccatggaagctcatgtgctgtgtgatgggtgttgtgagctaagctatcccagctggtgcctcatggggccatgggtggtgtgacctcgtgggataccaggactggggggccatggtcctcaccagtcccttcccttcttcccttctacccacaggttcccgggaacctgagtgcagctcaggtggccgcgcagaatgcagtggaggctgccaagaaccagaaggctgggctgggccctcgctgtgagtcctggagtgaggatgaagggcgggcaggggccaggcaggcctctctccacacacttgttccccacttcttcccttggtctctcccacagtctcgcccatcacccctctccaacaagctgctcccggagtgggtccccccttcagccaggccccagctccccaactacccccaggaccccctggcgcccccaagccaccacctgcttcccagcccagtctggtctccactgtggcccctggctccggcctggctcccacggcacagcccggggcaccgtccatggtaggtgcctgcacgcctcctgcccctgctccttcctcctgctgtccacagctaggacagttagaggatgagtcatttgccttccagggggatgtggctctcgtggttctggggctttgggggctcgtggtgtgtgtgctgcagatgcctgagatgagggtctggggacagagtggggaggctcatggctccaggagggtcagggctgttccgagaaacccaaggaatccctgggtctgggagtccagggcatcgcacagcttacgagtcctcgaatcctgcaaggtccaagcatttggggtcctgcggctggccaagtgctgttctggggatggaggggcagaagaagggatctttcctccttcctggtttgccctcacaggatggcccccggaggctcccggccttccccattctcatggccctccttcctcccctctggcaggcaggcactgtggccccaggaggggtgagcggcccttccccagcccagctgggagccccagccctcggtgggcagcagtcagtctccaataagcttctggcctggagcggggtcctggagtggcaagaggtgaggggcctgagggtccattgggcacttgggactcctggggccgtggggctgggcatgtaggactcatggggccagatgcgtggggtctgcagtgctgggtttggaggcattcgttgcgctggacctgtgggatgcggggcgaggccaggagccccatggagtggtgggacttgcggtacagaggagagtccccatgcaaagaacccagaaaagcccaggatttggggcccagagaagagcccaggcgatgtatcatctggggcacagtggatggtgggatttaggggccgggcacgtagctgtaacatttgaggaactgaaggcttgctggtctggaggaggggcctggggctcatgggacttaaactggggaacatcctgagctttggggctaccagggtaggacatgagggctcaaggggactgaggcttatggccctttttactgacatgctcttttttccccctcagaaacccaaacctgcctcagtggatgccaacaccaagctgacgcggtcactgccctgccaggtctacgtgaatcatggcgagaacctgtaggtgacagtcaggggcggggtgtggtggggctggggctggccccctcctcacacctctcctggcatcgcccccaggaagacggagcagtggccccagaagctgatcatgcagctcatcccccagcagctgctggtgagtggcggtggagggccagccctgctgccgggcagtcctcaccctgctgtctctttcctgttccctgccccacccccactccctgcctcatgtccccgcctcacttgcccacaccagcatgccagccgacttctgtgtctcccgcagaccaccctgggccctttgttccggaactcaaggatggtccagttccatttcaccaacaaggacctggagtctctcaaaggcctctaccgcatcatgggcaacggcttcgtgagtccagggcatggggggccgaggggtgttgactcttgtcctgctttctgctgacctttgacgggaatcccagagtgcctgggcccacggaagccgtttttgatggttgggtgcacttcatgcccttaggttcctcgcctttcttctagagccgtgacttttattataatcatcgtatgcaccagatttgagggatattccacattaaaaatgtgagctggatgtgacaggatcagttaggaggaagctgttgattctggcatggctttatgggatgtgttcatttcctgtggctgtggtaacacattaccacaagcagaggggcttaaaacaacagaaacgtgttctatcccagttctggaggccagaagcccaaggtcagggtgtcagcagggccacgctctctctagaggctggagggaaggcctcttcgttgcctcttccggccggtaaccccaggcttcaggtggcatcgctccagggtcttcctccatcccgcagctgtcttccctctgtgtgtgtctccacatggcattctctctgtatctttgtgtctgtgcttataaggacatcagtaattttggattaggccccattttcctgacctcatcttactacaattgcaaagaccctctttccagatagagtcaccttcacaggtgctggggactggaacctcagcttagctttctggttttgttttttgagacagagtttcactgttgtcagccaggctggagtgcagtggtgcaatcttggctcacagcaacttccgtctcctgggttcaagcgattctcctgcctcagcctcccaagtagctgggattacaggcatgtgccactatgcccagctaatttctgtattttttagtagagacagggtttcaccatgttggccaggttggtctcgaacttctgacctcaagtgatctgcctgcctcggcctcccaaagtgctaggattaccggtgtgagccaccgcgcccagcctcagcatagctttctgggagtcacagttcacactttgtaactcggggaaggagcagatcagttacttccgtgcaccaggcactcctgcaggaaagagaaccttagggggatcacctcacgagaccctcacagaaccttgtgaagaaggcattcctgagagttagtacttccggctgcaaatcacgtagtttcccaaacacatagataattgggggcactcggaaaaaatgttctcttatgattctgtgggtcacctgggctcagtgggccatctcgcttggcgactctcacggggttgccatcagatggcagctgagactctggtcatctgaaacctttactgggctggatgttcaaaacagctcctcacacagccctggctgttggctggggcttggctaggaccggccatcccagtgtctgcacatggcctgtccacgtggccacactgtggcagctgggttctgagagggcaggcgttgtaggagcaggcatttatattttgcacaggacaggacatctagagggggccagctattgggattggtttcataggtctgtgacatcagggacagggccctgtggttctcttggcctctcctttatagtcacaaggtagctctcatggctccacgcatcctgtgtgctttcatgaaggaggggaagggggctgtgtgtttccctttcttcaagacagcagaaactttctcagattccagagcaggcattcctttcacctcctatcccggacctaggccactgggcagcccctagttgatgggaggctgctgggagcaggtatccgtgactgtctggggctgggacatgttacagccccagacagcattgggaatgcaggggaggaggacacttggatatggaataggcagctagcagggtctgtctcaggcaggaaaccgaggctcagagaagtcaattcacttggccaaggtcagcctcgcctccctcaggagcccctgccctgaatgctccatgtgttacccccctgatgaccagtgatgtttcctgggtgcttcctgtgggctgagcctcaggcagggctcttgctgtggatcagacatcgcatagtcacagcgaccctgtgatgtgggagcactccccgtggtgtacactggccggtgctgagggctggaggatctcttggatacccggggtccgacccaccgttgatcacaggcctgtgggtaccacgctgtgcatctaggccgctctcccggccgtgaccctcagccgccctctgaggaggccgccgtggcattttatgcccaagaaactgggtccatgaggagcaggtggtggctgaaggttgaagagctgggctccagcactttctctccgctttccctctcagtgggcagctggaaccctagcttgccctgagcgcctcagtttctgtctccagagcaacccatagcacacctgttctccttaaccttctatagcagaaacctcacctcaccttgcctgtggggcctctagagccttctggaatggggagggggtcagggctgcctctttcagggcctgaatggttctgaagagctgttgtccacccaggcgggctgcgtgcacttcccccacacggcgccctgtgaggtgcgcgtgctcatgctcctgtactcgtccaagaagaagatcttcatgggcctcatcccctacgaccagagcggcttcgtcaacggcatccggcaggtcatcaccaaccacaagcaggtccagcagcagaagctggagcagcagcagcgaggagtgagtgttgacagtccccaaaccagcactccgaccccctcctgcccgggccccacatggccccctggggtctccaggaccaagatgcccacccttctcccaatatgtggtgcctccaagctaagtcccactcagattttcttgcagtctctctcctttttcagcatccacatcaaagccctgacacagcttcctcctggagaccttggagtgtacggcatccctcccagaccactcacccccaaagagaatgtccccatctccttactagttcccctcagggcacaggccctcccgcctcagattcaggatgccaccaccctcagttactgacctgcccctctctccccgtgcagatggggggacagcaggcacccccagggctggggcccattctggaggaccaagccaggccctcacagaatctggtgaggacagggctggcggggtcggggctgggttggggaggccccaaggctgcgctctgtgcctgcagaaggggcgtgaggccctgcccatctccctcacccctgtgtctcttcccaccagctccagctccgcccaccgcagccccagcctcagggtaccgtaggggcctctggggccacggggcagccccagccccaaggtactgcccagcccccgccaggtgcccctcaaggccctcctggagcagcttctggcccaccccctcctggacccatccttcggccccagaaccctggggccaaccctcagctgcgaagcctcctcctcaacccaccaccggtgagatgttggggtggggtagcgagagttccagatcctggccctggtggttctggtcctgttgtctgggaggagggaggttgactgtggtcagtgggtgtgaatggggacccgcccagggctttaggcagaaggcagaccgcctcctctccgtccatcccccacctttgaagaaaaacttcccctcaccactagctgattccatctctgagcagtgtctgtgttgagaggtggggagtctctaccaggagcctctgagccactctctgtgttctcccagccgcagactggggtgcccccaccccaggcctccctccaccacctccagccaccaggggctcctgcgctgctgcctccgccgcaccagggcctggggcagccccagttggggcccccactcctgcatccaccacctgcccagtcctggcccgcacaacttccccctcgggctccactgccaggtaaggggacccgggggagggcagaggtctggactgagtgtcccagcagctcctgggctagagcaccaagaccgagtgctcctgggaagtaaagacataggatccaagaatgagggttcccccatggcctttgcggagctctgagggctccgggaaagtacagcccatgggtccaaggacctagtgggttaagagcgtttcccatgatcctcctgtgtgtgctcctgggattgctgggaaatgtggtcttagggccagagaagtagttttggagaagggcccccaaaggctcatgggaaacagcatatttgtaactagatggggccagaaggtgcttctgttgggtcccccaagggctgcctagaaaacttagtgcctctgggccctcctgggcccaagggcctactgggagatgcagtcccttccccactgcccctcaggtcagatgctgctgagcgggggtccccggggcccggtcccccagccgggcctgcagcccagcgtcatggaggacgacatcctcatggatctcatctgaatccccaacacccaataaagttcctttttaacacacgccccggctcccgtcactgacatccctcaggactgggcaggaggaaaccccagggggcatctctgtccttgttctcacttcagcagacatccctggggccctgggtgaatgacgctggggcctccgtggtgagtcacaggcagtctggtgcaacctgattcgtgggagatgcagggacaggcaggcagcgctcaggactcaagctctcatggaggtggcaggggcaccatgggagcctggaagaggcatctgacccagccccagctcctcagagtcttgaaagagaatcagccgtcaggctgggagggaaggaggtgaggggtgatctgggtgcagaggacaacagaaactttgaatactcaaaggcaggaggaagcctgagacattgagaggagcaagttgatggatgcttttggagcatgagcatgtagggagctagagagatgggcaggtgcagagtttgaggagctcggattccaaactgagcagcccatggtttgtcctggggacacaggagaaccaggaggctttgagcagtggggcgggcctaggccagctctggatgtcagaaagacccctctcagctgtagagcgtgatgaggccagacaggaggccaggaaaggtgaggctgggtggtggcggtgtcgggggctggggtagaggttcgctcccgggggccaggcctacgtgatggtaggtggtggggctcctgggagaaggagctggtagtaagtgcaggtggtccaagggacatccaggtgacaggtgccatgttgggagctcaggacgtgtccttaggggacagtgtatgtttggcagttcaagccacagaagcagacaagatcgcacatggagagagggcagtccctgggtccatgtcagagactgaccttccagggctgtggatggggaagacggtgggtctgtccccaggatagaatacccagcagggaacaggtttgggacgtggcaaggtgagggacctgaaggatgtcctcagagacgtcccgagggcagggggatccagacaggcttggagcgcagggtggtctctcctggaggtggtgagtgagttgtctgttgttggactctggaccagtgttgctgagagcgcggtccatgcctggaccaccagcatccacatcattttgcatgctggttaacgtacagattcacgggccccaccccaggagagagattgcaatctggtggcctatgggccatcgtgcggatgagttttgtttggccttccctgtgttagcatatgtggcatttttttcttacgagttagttgtaaaaatcaggttaattcacacacacacacgcacacacacaaaatctgcagtcttggcttcttttgacaagtcagaagaattggcacccctgggcccgcccttctgcctggcaacaatgggctggagctgcccctctccatggggcgtgtgctttctggttcgccacagtccccaccactccctcttggcttccctgtgaggcagagagtcactgcctttgtcacggggtttgcactgtggttgttctgtggtagcattcagaggaaagtgaaatctttcttgtacccatgtctctatcacaagcggcaaaacgaaagagagaaggagagggccgtgtgtttcgagaaaaatgggagcgagcctatttctttgtggaagtgaagagcatgcctatgtgtttaatatgcaaacaaatcgtgtctgtgttgaaagaatacaacctgaaacgccactatgaatcaaagcatagtaagagctacgaccagtacacagaacagactcgagatgccatcctcaacgaactgaaaaagggactcaaatgtcaatagggtttgttttgaaaagcgaattaacagaagtggcgcggcagtggtacgccgttccggaatcacgtgagaagaatgacctgggcattcagagctacagcagatggcaagtttataaaggagcagagtgacgtgtcctgcacagaaacacatgactgttgagaccgttatttaagtctaacgggcatttgcgttgcacagtgagttggagataactcgggggatttacaagtccagttgcttgaaagagtcaaattgattgtggccttttctttcgctgctcataaactattaccacccagttagctttatttatttgtggtgttaagaatcttgatgtgaccgaagaagtctgtggcatggtgccaaggcaggcccaacactgggaaaggactaattttttttgtatattgagagaaaagtttcacatagactggccagagttccgaagcacaactacagacagcgtcatgacagggggacttggcaggacaccttgatccaaggcgacagcatttggcaaggacacggaagttgggtcgttgcatccatcatcaggagttgacttgttctgagcaactgaacagaacacaccgcgatgctctcgacacttccgctcctggacttcagtcacgagtgagttgatggtgacttgacctgagagatttcacagaagctctgtgacttggttgtggaagaaatctgaactgttcaagttaaccaacttggttcattttaaatcaggcaaaagccacagtgggttcccctgagaaggttagtcaaagacttctggtcaaggttatgaccgttctgaacactgaatatttctccgcaaggatgtccacaaacagctacttgaatgtatgatggtgtatgcttggtcctggggaatccaccggcaaggaaaaaaaacctttactctttcctgtgctgcagtcggctttcagaaatgaaagaggtggcccggactgtattcacctacgtcctggggttgaagaccaaattcccccaaaggctctcggaatccagactcatgagaaggaacagacattgtccagtttgcctttgttggcagatgtttcttgtgtgaatgcagaccataaatagtaattgaactacagtgcaatacggcgctggttcctaaatacaagtctgtgtgaagatggtgagattctacaactatctccagtagttgtcctgaatatctgtgtttgggagtacccacgcttgtgaacagctgttttccgttacgaacctgaatcaaattaaacatcgttcccagttgaaggattcaaggctgaattctaaactgcccgtccccaccgtgccacccgaggcctgacactgacatctcggtgtggaagggaagacgccagccttttggcttcaactcaaaggcgcaaaaagaattatgaaagagaaaattttaataattaaatatttctatttttcaatttgtattttttcaattttgaatttaaaaatataaactccagtaacatccatgtttgtattatgttccatgcattcaccatagttgagtaaagatccgatttgatgatatttctggccgtcgacttttcttatacctggctagttcactcatttatgtgacccgcctggcccctgtaggcatgtgagtttccgatccctgccctggaactgttggatccagtggggggagggcgggggtctgggagtcgtgtgagcaagctctctaggcgatcctcaggaatgtgagtgtggagcaggaggcactggtgacagcgaagaagtgcaagtgggtgatttcccaggcagcctgtgtagcaggggtttttgaaaactcagatggcttcagggaccaggcaggtgatgaaaatgtgtgaagcggacgggtgtaagacaacagggaatgatggggactgtggcgaacttggagagtgcttgccccgcctaatggcattcaaattgaaaacaaaaacactgtgaggaccaaacaaaatctgcctgtgggtctaatgaggccgccaggccgccattttgcgactggaagaaggagaagactcgagaacaaggacagaaccctgagaaagagccacgcgtaagggttgggcagggagccagaagacaggagaaccaggcaagtgtggcgttctggaagctgagtgtttgaggagggagcaatcgactctgtcagaagccgctgagaggagcaggaagcagccttcagtgtttccaccagggtggccatgtcccccggcaagggaaacgcaggtttggatcagaaacaaattggttaaaaggaaaggtttccagtcgccagtttggccatctcatgccagtggcgccctcttgaccttaacactcaaattagaggaaccagagggactgtcgtggcctaatcacacggtttacaggagtgaaccggggcttgcttattaatagtagcagacctgttaggggtgaaagaaaatgcccacccaccagctccaaagaggaattaggagaaaaaggacacctcaaaaggggtgttaagaatgtatttgtttcaaggtacgcaaaacactaacatattttctcaccatcttggcatttaaaaaaaaattaacttttaaaatgtattaagttacacacactagaacagtttcctaa[139 bp omitted]tatggtgaaactctgtctttactaaaaatacaaaattagctggccatggtggcacatgcctgtaatcccagctacttgggaggctgaggcaggagaatcacttgaactcgggaggcaaaggttgcagtgagccgagattgcgccattacactccatcctgggcaataagagcaaacctccatctcaaaaaaaaaaaaacccacaaaaaaaaaaccaaaaaggaggcccaaggaatgaggccagatctaggcacatgggactcacctccccatttcataggtcaggtgacgataaggcctaagaacttcacatgccccttagaaccagccaacaccaacagagcaaatcttttgggaaagtttttccctgaatacaaggttctcctaaggcaagaaatagtgaaaaccctagaacagcagggtttaatcccaagattctgcgctgattagctctgtgacctcgggcaggtccctgcatgtctctgagcctcactttctccatatgtcaaatagtgactaccccagaggattctcataaggaatacaagatctggcccagctcagtcctggacacaggagagctgctggtagccactgttgtcatcttttggctgaaatgcactctaagaaggtaaaaggtgggcaaaactgcttctagaaatgcatgccaagctggacctcacgcctgtgatcccagcactttgggaagccgaggtaggagaatcgctttgaggccagggtttcaggaccagcctggcc[131 bp omitted]ggccaacacggtgaaagcctgtctctagtaaaaatacaaaacttagttgtggttacgcacacctgtaatcccagttacttgggaggctgaggcataagaatcgcttgaaccccggaggtggaagttgcagtgagccaagatcgtgccaccgcactctagtctgggtgacagagcaagactctgtctcaaaaaaaaaaagcatcctaacttacaaaaatcacttgtgtccagaaaggttataattgagtgagtgacttgttggaaacattttctttttgaccagtttgcttttgaatcatgcatcatgactggaggcaagactggggattcatgaaaattcttgcaaaggagcaggtggtaggacgtaattggaaaaaagtgattgttgaggcaaaaatgctaaaacaccaacatattaatagttggaaacctgttcggggtgaaagaaaatgcccacccacctccaaaggattatgagaaaaaggacaccttctcaaaaggggtgttaagaatatatttgtttcaaggtacacaaaacactaacatgtattttcttaccatcttggcatttaaaaaaaattaacttttaaaatatattgagttacacacactacaacagtttcccaaaat[132 bp omitted]gccaacagggtgaaaccccatctctactaaaaatacaaaaattagccagcatggtggcatgtgcctgtgatcccagctacccagaaggctgaggcacgagaatcactagaacccaggaggcagaggctgcagtgagcagagattgtgccactgactccagcctgggagacagaccaagactctgtctcaaaaacaacaacaaaaagtggaactaccctatcacacctcactctcgcctctcctgcccaaacacacaccctgagcaaaccacttacctccctagaggctgatgtaccagttctgcatttgggtttacatgcatgcggttgtggatatatttatagtttaatttttttgtataagtgagtcaatttctttgttctttagcttgcttttttttttcttccaaccaaagtaatggccattatttatttatttatttatagacagagtctcactccgttgcccaggctggagtgcagtggcgtgatctcagctcgctgcaacctctgcctcccaggttcaagctattctcagcctcccaagtagctgggattacaggcaggagccaccatgcctggctaatttttcgggttttttttttttttttttttttgagacggagtctcactctgttgcccaggctggaatgcagtggcgcagtctcgactcactgcaacctccacttcccaggttcaagcgattctcctgcgtcacccttccgagtagctgggattacaggcgcccaccaccatgcccagctgatttttgtatttttagtagagatggggtttcaccatgttggccaggctggtttcaaactcctgacctcaggtgatctgcccacctcagcctcccaaaatgctgggattacaggtgtgagccaccgacctggcctgcctgcactgttaattacctgttcctctatgtccccacttctcatggtggcctcaggtagtgcactaaatggacgcatttcagttccacgagccatcctgcctataagttatctgttgtgtaacaaaccccaccaccgagtggcttaaaacaagaagcatttattgcctcaccgttgctgggggtcaagaatccaggcttggctgagctgctggctcccaggctctcggggttgcggtcgagctggtggctggggctgtgcagtcatcggaaggctccgtgaggagggcccacttccagcccactcacatgcctgttggcaggattcagttcctcacaggtgatggggccgagagcctcagttcctagctgttggctggaggtctcccttgttttctcgccgttgcaggcctcttcacagggcaccttgcagttgcaatgtggcatccagcttctctagaaatatgagaagggctgggtgcggtggctcatgcctgtaatcccagcacttttgggaggtcaaggcgggtggatcacctgaggtcaggagtttgagaccagcctggccaacatggtgaaaccctgtctctactaaaaatacaaaatattagctgggcgtggtggcaggcatctgggaaatcccagctactcggaatgctgaggcaggagaatcgcttgaacccaggaggtggaggttgcagtgagccaagaacacaccattgcacaccagtctgggctgcaagagtgaaactgtctcaaaaaaaaagaaaaacagaaatgagagaggacgcccaaggtggaagctgcagtcttttgtaacccaatcttggaagtgatatcttgtcactcttgctatattctgtacattacaacaagttgctaggttctgcccacactcaagctgagaggacagtgcagacaggaggtgagggtcatgggggctgtctttcagggtgcccaccacactgcaccctgccagttgagggcctgtccagtttttcttttatttcttctttttttttttgagatggagtctcgctctattgcccaggctggagtgcactggtgtgatctcagctcactgcagcctccgcctcccgagtagctgggattacaggcacataccaccacacccagctaatatttgtatttttagtagagatgggattttgccatgtt[135 bp omitted]tgtatttttttaacccacttgtgcaggcattcctatgggatgcattcccagcagcagaatttcaaaactaagtatgccaactttatttacatgacccaaaaaatgttgtattcatgtttcgcatatacgagaaaccttcctatggttcacacttggaggggctccagaaaccaaccaatgcagtctctctcagctccctctagagatcagttaccaattgcttaagtgtcttttcagagagacgtataagcaggtacaagcaaatagagaaactgattgattttctggcttttctatccagtggcaatctcctttattctatcatttttttgtttgtttttcaatctaacaacatatcttgaagtttggacaaaaagccttcattttatttatttttaaaaatagcccagggggctgggcacagtggctcctgcctgtaatctcaaacccaggacgctgggtttggggatagggcagatgtatgtcttttacaatctgggaacactcagcatggtctgtgctggagggcagatggtggcagagaggctgagaagcgcggcagtgacgagggtaagacggtcccaagcccgaggggcttggccccttgtttattccacaaagtggaggccaacacctactgagattaagaacctgggccctgtccctgtcccgtgtctccgcagcctgtgacgtcaggcttttgcttccagatccttggtttccccatctgtggagtggggattaaaagattgttgaactcatggcctgctgtgtgagaattcagtgagttcagacatgaagttcttgagaaatattaactactattattgccaggggtctcactctgtcaaccctggagtgcagtggcatgaccttggttcactgcagcctctgcctagaggggtcaagcagtcttcccacctccacttgtcgagtagctgggactacagacacgcaccaccatgcccagctaatttttgtattttttgtagagacagagttttactctgttgctcaggctggtctcgaactcctggcctcaagtaattctcctacctcagcctccagagtagctgggactagagacatgtaacaccacgcctggctagttttatagttgtagagatggggtcttgctatgttgcccaggctggtctcaaactcctgggctcaagcaatgctccaacctcagcctcccaaagtgttgaaactacaggtgtgagcctctgcgtctggacacacacgatgatgacaaagttgaaatacctagagtttgcaaagcatgtatcaggcagacctttaaaaaaaaaatcagccataaactattttgtaattgcaaagaaagaaaagaaaaatccaagccagagatgatcttactcccatttcttagcataaagcattttattatcttttttatttgtttgttttgagacggagtctcacactgttacctgggctggagtgcagtggcacaatctcagctcaatgcaacctccgcctcctgggttcaagtgattctcctgcctcagcttcccaagtagctgggattacaggcacccactaccatgcccagctaattttttgtatttttagtacagacatggtttcaccatgttggccaggctggtcttgaactcctgacctcatgatttgcccgcctcagcctcccaaagtgctgggattacaggtgtgagccaccgcacccagcctattagcattttttgagacagaatgtcgctctgtcgcccagattggagtgcagctcactgcaacctccgcctccccgggtttaagcaattctcctgcttgaattggaggatcaatcaggagactgtatttgtattcctgagtagctgggattgcaggcgcctgccaccacgtctggctaatttttgtatttttagtagagatggggtttcaccaggttggccaggctggtctcctgacaacaggtgatccacctgcctcagcctcccaaagtgctaggattacaggcatgagccaccgtgcccggccagtataaaacactttgtccatgttgtcattgtgtcctagcctatgtcatccaacctatatgtactgccagtttgttcttctaggaaactcagacttggtagttgattggtttaacaaatgttggttaaactgggattatttgggaaaaaaaaattgtgtatatcaggaaaggccagattacccccagattgcagtggcttgaaacagccaaggtggattttgtcactcgtgctgtattgagtgtcagcttggagcccgtgcggacagatcatgaaggttgccaatggacatagtaaaggcagaggggtctggtcttccattagcaattatgtgctcttgctgaattcacatgtgtcacttctgctcatatctcattggccagatgtaatcacatggcctcacaccttactggccaaaattaatcacatggccgcactcaagctaaatggggtcaaatgctggccaagtgtggagctagaaatatatggcaaatagcactaacggccatcttaacactttaaacatcttattttaaccaagaacatttaaacagacatctcttgtacgtaggaccaagaccctttctttcagtattggtctcctagttagcacacgacattacattcttgtttttgagacagggtctcactttgtcacttggactgaagtgcagtggtgtgaacacggctcactacagcctcaatctcctggactcaagagatcctcccacctcagcctcctgagtagctgggaccacaggtgcatgccaccatgcctagaaaattattgttgtttttgtagaggtgggagtctcactgtgttgcccaggctggtctcgagctcctgggctcaagcaatcttcccacctcagcctcccaatgtgttgggattacgggcatgagccactgcgcccagtagaacatcacattcttgtataagctccacccacaaaccacaatgagtcatttttttaagtggcttgagaacctaaagacatttatgaaacaaactgggggctgagtcttcctaggtttttataagctttttcattaaataatttacagttgctttacttgtacctaacttggcagcatttttttttttttaagagatggagtcttgctttgttgctcaggctggagttgcagtggtgagatctcagctcactgcaacctccaccccctgggttcaatcgattctcctgccttagcctccagagtagctgggactacaggcatacaccaccatgcccggttaacttttgtatttttagtggagacggtgtttcaccatgttggccagactggtcttgaactcctgacctgaagtgatctgcccacctcggcttcccaaagtgcagaattacaggtgtgagccaccacgcctggcatgtttttcttttaacaactcccttttagtctttccaaagcaagcaatctggtttgtgtataaacaactgtcttgcattaatttcattagtttgatagtaaattaaacaagaacttctggcataaacaggtttggatcaaacagctacctttcaggaagtaaacagcttgagagatggaagtggaattgcttagtcataatagtagcctgctagccccagcagtgggcttcacagatgaaaaggaaagtgtctttcaagttggtggaccgagttaagtgagatggtttcagagagttttgttgcagtattactgatagaatttcagcctacattttcatttcactttctgacatgagttcccattttgctcactctggagtacaccctggtataccgctctccatgcttatacaattcagggcattcaaactcacgtgtgtcctgatgggttctgagggatgggaaggcattaacaggtagagaacaggaaggatgggagagagattttttggggggcggcagcaggggccacagtaccaagtttggatttaattctaaaggcactgggaagccattggatggttttgattattgtagtgacagagaaggcagcaagagttaggagacgtcacccaggcaagagatcttgatggtttggaccaacaagaatggggagaagtgaggattccgggagattaaagcagctcctgttttttctccttcctgctgccaggttgtcctcacatgggtgattgacagggcattggaggtacctgttgataactaacttgcagtttgtgttcagggagcactgactccgtttggccacaatgcaggttggatttggggtttaaggctgggctccagtcagccctcgggagcccctgggcaggaaaacatggacaggcctacgggttcttctgccatttcactggccactcctccgtgtcctttgctggttgcttctcattgtcgtgactgctaaagggatgagtgtcccagtctctttgtgagctcatccagtctccattcaaacactgatgactcccgaatttctctctccaggctatgacatcaatatctatctacattgtttagtcaacatccgaaacagaagtagggactccgtctctaacctcctacagctgtgtctatttctcctctctaccttcactcgactccgcccacactggctcccttttattccttctactttcaggatttgtctttgctgttctgtcctctttgcacacttttccagccatctggaatggcaggttgctcacaggtcgttttcttgacttcccttgcttgctaactttacctcgctatggtcatatcccatcgccctgtggatgtgcgctagttaacacttagcacagcctgtgattatgtctctccccagtggaccgtggggcctgtgagggacgtggtctgattcggtcgtcgccgagcacagaactggacagggtactcataacagatttttgttgttgtttttaaagaaaagctaacatttgagtagtgactgcgccaagcagtcaagcacagcccctcgggctcgatccccataaccactctagggttaggtattacccacgtttaaggaacaaaaatcgagggaaaaatcttatacaactactagtaagtagtcattccattttagcagagcgaatgagcgaatccacggaaggccggggagcgacgtgagtggcgagaagcttggagtcgccagggacggcgggcggagcctgggcgccggggctaatgggcggagcctccagggacagctggccccgcccaggccgcgcggggcccgctgggagttggagtcccttgcccacctcgccacgtcaccgactgcaaaccttcagctgtctcaggctcgggtgcaatccgtaccctcagtgggttccctttcagtgggttcctttgtccccaggcccattattccgtcctcccctcttccctgatgtattttggcgcggtctcctggctctgcgggcccagggctccggatgaggtctcccgccgtcccgacccccgcaaggggccagcttggtgtcgccttcgttcttctgccaccccattcggtaggggctcccgttcccgccacgccccctgaagttgtggctcgcgcgtcttcccaggactcccccgcgccggagaggcccgcaggaccgccgagcccacactccgctcccgcccgggccccgctcccccgcgccgccttggtacgctccggccacgccccctcggacgcgcttggtacgcgccgggctcccccgctcgcctcagtggttcggccgcggcgaccccactccggcggcgcgtcccccgagcttggtacggctcagcccgtctcccccgaagccgcgcgcccgcgcccgcgcccctcagtcggtggagcccgcagccccccttgtggcccgcggcagctccccgcccgctcggcccgcgcccgccatggtccgtccgcgccgtgccccgtaccgctccggcgccgggggccccctcgggggtcgcggccgccctccgcggcccctcgtggtgcgcgccgtccgctcgcgctcctggcctgccagcccccgaggcccgcagcctccgcggatccgggcccgctcggcccctcccatggtgagccccccgccctttttccagagccttccacggccccgcccccccagcccctatcccgggctcacgcctttgtccgcagcccccgccgctccggggtgtcccctgtggcccgaagggtggtcccgcccggggccgggttcccccgtggagcacccggtggttcgcgccgcgctctcccctttgttgcgcgttcgggccggggtggggggttgggggacgggggcggggcgggctcatattactgctgactccgcggcccgatttaaacgcgggctgggggcggcagacaggcagccggcacgctcgcttgtttttcctattggagagttgctcgctctccgggcaggaaacctggaaatgggggcggttttgggggacagcggcgagggaggggcccgcgctttgtaccagcgcccccagatgtcgcacccgtgggcgttctcccctggcggccgctccgtgcccgtggagtgcgcacctagaatacgcgcccgcgcccacatgtgggatgctttgatggactgccgtgagcccagaccttaaacgtaaacattcagcttcgcaggtactttgggctgcacacgcttctccggacccaaaagatgcacatgcttttcagaaaccgtaaggtttacctggggctgtaaaaccgcacatcgcgactttgcaccgtgcacacgcttgccccgatgtgagatttcccctgggttcgcgctcgggtccgcttcttaaatacactgcctcagcggtgtggatggcacagagctgtggcagccctactgaaaccttaaacaggcttcctggggtcataaacatggataccgagacttagatcacctcccacaacttaaacgtaccccttcactccactgccttcgccccttcctgcagcattcgcatctagttgttcaaaagtgctttccgggtcctcagacatgcaccccaaggttttaaacctcagtgcaagtactagatgggcttccctgtgcaatagggatgtcaggcgcgcagttttgcacacgattgccaagatgtgagatttactttaggttgcaccttaaccgtcgtttttaaatatgatcgtcccatcttgatgtgctgctcctgctgtggaaggtatccctgggttttaggcaagcatatgtgttctttactatggctccagatcccagcatatttgaagtcctgagtcaacctgctctcctagacaagcagacattaagtatgtcgcttgggctcttaagtgcgttctcctgacttttacccatctttgtggcagtaaatgcatacgtgtcactgtatatgcggactagatacctcaggtcccagcgccataaacaacttgtatgttgtaagtgtaccctcatctcgaaagtcacctccagctgtgcgttttaactcatctcagatgctggatgtccggtatggtgcctgaagcccccggggcaacatccactctctgtccaactcattctaacgccaagatactcaggttttctatctgatcttctgacgactgcccaaaagtcagaatcacctgcgtgggtgaagaatcacctgcgtgggtggagaatcacctgcgtgggtggagagcaagtttgttcaggtttttctctttttaagcactcacaaaataaaattttttgtgtttgctagtattctggaaggaaagatctccttgtgcttcatagaaaatttggaaaatacctgtttgtaataagataaaaataaatcacccttataatttgttttcccccgcctggaggcgcctattacggggaaactctcgtgggtttcctgctgccaggctgtttgcggagctttcccttgtttgctttgagat[134 bp omitted]accccatctctactaaaaaaaaaaaaaaaaaaaaaattagccgggcatgatggcgcggcttgcagtgagcgaggttgcagtgagctgagatcgcaccactgcactccagtctgggaaatgagtgaaactctgtctcaaaaaaaaaatagtaataaaaatagtggggagagtgcctgtgagtagcatttgtggcgttgcttggctttattgctagaactttctcttggtgttctacatgttttggtctgtgagacccctctgggggtggtgtcccagctgtcttccaaatgtttcccccttttcctcgctgtctttctcctggatggtttagtcccctctgtgtttcttgtcatctccttcctgcctccccccggggtcagacttataaggccagagaggtgggcactggcctgagccagaggaaggaattgaactttgggatgacagggagctttaggagagtttcagcctgggaaagacagggcaagctggtgtgtgggacagacacagcgcaagccggcttgtgcctgtggaggctgcaaggaagccctgggcccagcctggggcacggggaaagccccctacagctggcttctaacttgggtctcaagaatcgatcaggcgcacagctggggcaaaggctggaggtggggctggctgaaggcttcaggactctgctgggccagtgtcaaggtgacagcaggctctgggaaggaagggtcctgagggtgggcagcgggaaaggacatgaggaccagcgtgtgggggtcctgaggggtgagcagagggtttggacatggccccgtgggcttccagcaggggatttggggctgaatattgggacgtcccctctggggtgtgtggggactgcctgtccttgcaggccccggcctcagttttcccacctatcccccactccattgcaggaaggtgctcgggtcttcggggcactgggtcccatcggtccctcctcacctgggctcaccctcgggggtctggccgtgagcgagcaccggctcagcaacaagctgctggcttggagcggcgtcctcgagtggcaggaggtgagtctctgtggggctgcggctggcctccagggtcttgtcttgtccctgcggggacaggccagggcatctaggctgtgcacagtgacgcccctcctgcccccacagaagcgcagaccctactctgactccactgcaaagctgaagcggaccctgccctgccaagcctacgtgaaccaaggcgagaacctgtgagtgccggggcgtggcagccagggcggtggcaggggcagtggctgtggccgtggggatcagggcagccctttctgaccagctccttcccatagggagaccgaccagtggccgcagaagctgatcatgcagctgatccctcagcagctgctggtgagacccgcccctcccaccccatccactctgagcacccccatgcctggctgacccagctgtctgtcctgtcgcccccagaccaccctgggccccctgttccggaactcccagttggcacagttccacttcaccaacagagactgcgactcgctcaaggggctctgccgcatcatgggcaacggcttcgtgagtggggcgggctcccttgtagcactgtggtgacaagtacagctggaggcagcgctctgctcacacagtccaggcgggggtcggggggtctcccctggggccgagggtagccctcgtggcctctcggaccccatctggaaatgactgactccaggcaccctccgtagagcacagggtgaaggaactcagcctgagaggcctccagtttctgcatctgtgcccagcttcgaggtggccctgggggcgtgagtgcagggagggactggggccagccctgttggggcccaggagcctgtcggggacacatagcgtatggcagggacctggtaaatgggtgtgctaggcacaagagccagccaggagggagtggcacgttggggcttggtattctggtctgtaaaatgggctaacctccccgagtggcctgagctggccgtgagggagcagagctgagggtgctgaagcaggcgcggtgagtaggtcctcaggcctggctccaaggggacccaggtatccagccagtggctgtgcagggactgagtggggcaggcgcggccatgacctggacccggggggctgccaagggatctgagagcggcttccgcagcactccagggttgggctggttgaggggtagagatgacattttctgaggtagggaggacaggggagccgtgcttcctagggccaccgggaggctggagggagggaatttgtgtaaagcgcttgagatggtgactttagtacctagtgagtgctgggtgaacccagctggtgaggctgttcaggtgactgagattctggcgcagggcaggtcagaaagggggcttgggctgtgaaagatggcaggtgctggagaggaggcaggggtggggtgggagcgagttgtctgcccagaggacctggctctgggacattcccagtccctgttccctgttgggacagtctgcctctacccgtcccagctgccgttgagcgccctgggttccgctagggcctcccttctccctcaggagaccaggggcagaccagggcttgtgcctggcatgaggtctcttaagtgacccgttcccccttcacccagcaccgtttgttgagggcctgccatatctgggccccgagtacccagtctgtagggaaagtggacatccatactcaccccccaggcatggccctgggaggctgactgtgcatggctccagggaggccagggacagggccctgagcgggtgatccctgggctggacaccaaggttgagaagttaggccggcagcgtggaggggacagcactgtgggggtggcccggtgtggggaggggacatggggttttgggacggtcacaccacttcatctagacaccacagccaggcacatctgtcaggcttagttctcccatgcgccatcctcaagaggcaccagcactttatctgttgagcctttatgtggcaccaactgtgtgcactattacccggttttacagatgatggaggcccagaagcaggaggtggctggtgttaggtcacacagctaggaggcagcagaacggtggggcgctgcctgtgctcttaacccccaggccaagtcaccccatcaggcagtcaggagggctggcggcagggggtgatgtgggtgggaggtagtgccttcttggcattctcaccgcagcctgggtgccgggtgccactctgacctcagccatggcagggtcgggggatgccgatgggcgctgcacgggctctcagaggcccctcacctatggccatggccttgactgtgggggcctctgtccaccgatgatctcccttcatcccctacaggtggggcggtccagggtggtgggggcacagtggccccgggcagtgaccacagggtcctgacccgcggcccccgcaggcgggctgcatgctgttcccccacatctccccctgtgaggtgcgcgtgctcatgctcctgtactcgtccaagaagaagatcttcatgggcctcatcccctacgaccagagcggcttcgtcagtgccatccggcaggtcatcaccacccgcaagcaggtgtgccagccaagcacagcccctctggggacagagggggattagaccccactgccctggttgggcagccagacttggtgtgggcggagtgtgatgcgatggctggagcaaggagctgcaggggagcccggaggatgccgggcgggttcccaccagggctccatggaaaagcggccactgggcggctctgcagggctggagggtgggtcttggcgcggcggcagggaagccagcggagcggggagctgggcaggggttgggatcgtcctgcggctggaaggccctgcctggtaaccacgtgtcctggtcatgccttgccagttgaggcagactctgcaggtcctgtgcaccaggtgagggccgggacctgtctcaggccactggggagccatggggggctgtgagcagatgaggggcagggcctgttcccctgggactagagaatggacccagctggggctaacaggccaaggctcggagggagggatggcaggccccaggacagacagacaggtttcccaggagcctgggcccctcttcccaccccgttcccttccaacaggcagtgggacctggtggtgtcaactcaggcccagtccagatcgtcaacaacaagtttctggcatggagtggtgtcatggagtggcaggaggtgagcactcggcagcccagggacttgggacccccagatcctcacggactgtggctgggaggggacactggcattgggggtctccagccctgagggctcctctttgcctctcccccaaaagcccaggcctgagcccaacagtcggtccaagaggtggctgccatcccacgtctacgtgaaccagggggagatcctgtgagtgctgggctggggggtggaggcagcatccaggggagctggggcttcctgaccctcgtccctttgtgccccacaggaggaccgagcagtggccaaggaagctgtacatgcagctcatcccgcagcagctgctggtgaggggctggggccgggtgctggagcctgcacgcagtagctcttccagagggcggggctgggggcaagagcgcctccccaggtggcctgagctggctgtgagggagcggagctgagggtgctgaagcaggtgtggtgggtagctcctcaggcttggcttcaaggggtcccaggcagccagctggtggctgtgcagggactgagcggggcaggggcagccacgacctgcacctggggggctgccaagggatctgagagcggcttccacagcactccagggttgggctggttgagcggtggagatgacgtttcctgaggtagggaggacaggggagtctcagtttggtcctgggcccgggggactcagcgggctgggagccgggaggccgtggtgggagaagccagagctgggggtcccctcgcttccccgcagaccaccctagtgccgctgttccggaactcgcgcctggtccagttccacttcaccaaggacctggagacactgaagagcctgtgccggatcatggacaatggcttcgtgagtggtgccagcagacgcaggggaggggccggccagggcagagcgagcccggaccgctcacgggggcggacatgggagaggaacagagcaccatgtcccagaccagctggggagagagggtggctagtgtgggcgtgacttctgggggctctgtgctgtccccacggcactggatggggcactgaccctggttctgcgggggcctgctcctcctctgccacatcagggctgactcagcaccaactccgcgctctccactcctcagggacaggcgcccttgtcactcctggtttcccgggagcttgtgccacatcccaaaggcccattgctgggcagggagggctgtctgcccccagcaaggtcccagaatatttggcgattgtcttatctgggggaggctcagctgactcctcttctctctctcgggctcagtttctccatctgtgaggtggagaaggttggactttggtgtttctgagccctccccccgatgtccaccttccagctgggccatacttgggtaatatcccgaaactaccttaaaattaccttcgactcagtctgagtaaactgtccacgaagctgttcgtgggtggggggggcctgggtgtaggtgcttttacatgaa[207 bp omitted]aacccgggaggcagaggttgcagtgagctgagatcatgccattgtactccagcctgggcgacaagagcgaaactcagtctcaaaaaaaaaaaaaaagtttcctcaaggaaacccagaaaggctccatgtacctcagcccttgcttgtgctgggccggccgctgcagatccctcgggctcctgagttgaagccatggccggttggctcaggtggctgtggtgaggtggccccagacacagcctggcctgcccaggagctctgaaatgcaggttcttgggcccttcccgacagagcctgttggcctttggcccacccattgctcttggccaccgtgtcatcccaataagggggcccacctccagggtgggtggggggtgtgaggacagagcagttaggctgtgcctggctcatggagcccacggcatgatgccgtggttggagggatgctggtccctgtggtgctgtctggtgacaccacgccctgtgcctgccaggccggctgcgtgcacttttcctacaaagcatcgtgtgagatccgcgtgcttatgctcctgtactcttcagagaagaaaatcttcattggcctcatcccccatgaccagggcaactttgtcaacggcatccggcgtgtcattgccaaccagcagcaggtcctgcagcggaacctggagcaggagcaacagcaacgaggggtgaggtggccggcctccagggctgctcagtctccctccacccccgctgcctgctcaccactggcctctgatttctcgccgtagatgggggggtagtggttaccccgggctgggcccctccaggagtcacagatgaggcccccgcagagactggtgagtggtgaccctgtcatgtacaggagggaccctggggcatgtggggggggtggggttgggaaagaagcagggcgaccttggccttggggagagcagagcagagggagaggcagcagtcccagcggtcctaggctgtcgggaaactgcagcccagcctcagggccatgggaggtggtatccaggcctgggtggggccaggcctctgctcacagggatgtggggtcagtgcttgggagcctgtggccagcagcccccactgcacccctgcccccaggtgacacgcttctgagcaggggcccctggggacttcaactgcccagcaacatggaggatggtgtcctgaggcctccaaggacggtccccacccctctacgtttccccaataaagccttttaaaaacctgcctgccttctctgctcactgcccgatgccttgcagccccctagctctaaggtggcccagcaggctggacagcccgggaactcactgggtctggctctcggctgtccacaccctcttcccccccgaatctccagacccgcaggccttgggttcaagttcagtgtcacagaacctgagctggattttgtcctcaggggtcacacctggccttgagccagcccctcggttgaggctcgtgggctcaccagctggctctcggggggccacacagcgccctccctgtgtgttccccggctaatgtctaaagtgctcatgccaggtcccagctggactcccctcggtagggccccaccttttgttacctgaaaatgtccttaaagcctcctccatgtaagaaactggcaggcctggagcccctcccccgtggggaccaccctccttccagcaaaatgccggccaagctcaaggagaaacagcgtttattgtggaggggagctgggcggggctcagccctcggagaactggcagtacagccgccccagcctcggctccacccatagccggaacgggatctccaggatggcagagaagccttcagccagcgttggggcctcgaactgcttcctggcagtggtgggaacagtgagggacagcctggatcatgtggcccagccagtgcccctgccccctgctatccccaacagtacctgtagccatacatgaccatgtctgacacggggatatgagaggagtccgtcatctctcgaaactgtggggaacatcagaggggcggcaggcccaggggtcaggggaggaggggggtcagggggtgcagcccggggggtgtccgggctgagcgggctcacccggttgttgtggcgcgcctgctccagagtggcggtgaagaggaagcagcggcaggggacgcccgcggctcgggcacactggacgtacctgtgggggaaggagctggatgtgcaggccccgcccaccccgccgcaggccacctacggccccgcggtcacgctacctggcgcggctcgcggcgtctgggtttgtgttgtcgatggcgacccgtttcccttgcttcagggctgtctcacacgtggtcacacagcgctgccaggagcctagcgtgtcctggggacacgagaggtcacaaacagatcggcagacccagggggagagaagaccccgagcggggacggggaggcaatgatggaggaaagccgccccaaaccagttgagaggtggagatgggaactttataatagatttggggcggcaaaagcctggtcataccctgttcacgtggacatatccggccgacacgaggtgcttcttgagaaaggtggacttcccggctgtgtggggggcagtgtcggtgggtggcctaggacccaggcggggctcagggcacgcgcacaggaacaggacacttacccccagggaatcccactgcgacaaccacctccgggctggcgctcaggagggccctggactcggggaggcagagaggccctgagcgggagacagtcctctgcgaggggcgggggacacgcgtgagatgccgtccccatccccgggagccctcccatccccacccccacccccgccccagggcctcaccggatcaaaggctgggagctcgaagccggctgctggccacttgagaaagaactcctcaggcgtggcgaagggcaggccaaggttgagggcaaactaggggttgaggacgaacatcagacacaggccagggtcgggctcgggcgcggggcagggggcaggggcctcaccaggcgatcggcgcaggagaagtctttcttcttccgccccggggcccagttggccgggcgtccggctgcgtctggaacacacgggacaccccgttcccaccagctcggagggaggcgtcccagcccaccctcagcagcctccaggcccttacctcccacaaagatgctgtccccgatggatatgggcgtgccgtcgttggcctacgggagacggtagtgaggaggcccttcccacaaatgtccccccgcagcggtagcgggtccctggggctgcttcgcctggtctgtgccccacatcaggaatcatcccccgacctttcatgtcctcactctccagccactttgcaccgtgctcctggccccctcccccctccgtggtctctccacacagccccctccctccaggtctcccgacttcacctcctcccgttccccacgcggccaccggagggcacccaccctgctacagctccagcctccggcgtgccggcgcctcccaggttccccctccctcagggcaaaagcggggccctccctgtggccctgccctctcccctccctcgcttagagccagccgcatgggcctcgctgtccctaactagcccaggctagggactgcctcagggcctttgcacttgctgtcactcccacaaggggggggaccgctttccccaggtgtccacctggctccctcctttccctgccttaggccttttcctctgatgtcacctcctcagaggccatccctgcccaccacgggtgatgcctgctttctccagctccctccctcctgctgttttacacgccagtctgcccatccgcctagagtcaccgccctcgccgtgagggccctgctggagcaggccgtcccgctcactgataccttcagctcaagaatgcgctaaacttcagaacaaatgcacacacaaacgaatgaacgaaggaatgaacagcttccctactactctgatgtagaaagtctgaaagcactggtctcgtaaaccaacatctaagatgtcacagcaaaaaacagaaggagggagcgagagaggacagaggagtaaggaggccccaaccggaggccggggagcccaggagtgaggggctggagtgaggaaaaggaggggggccgggcaggctgcaagactcacctgctcctgcagatggtcccacatgcccgtcaccggcttccggtacaagcctgcgtgcgtggccaccagcacctgtggatgggagggggccaccagctttagctccccctcaagcacctactggatgccaccccagcccagaatttgtagctgatgatgggttcctatcagcatcacactgcctgaggcctccgccccgcttaccctggagtctaaagccctcgctctggatctctgtgcccccacatagctcccagcctcccttccagccatacctggaaggggacccccagcttctccaccacagcctccaccttggccttgaactcctcggctggcagcttcccgcgcccgatgctcatctggttggtgaagatcaccagctggggagcaaagggtgtcaccagacgctctgctcaccagggccttggtctgactgcggtcggaccgccacgtgcacgtgcccatgcagacaggcggctgcacataccttgtagccctcggcttccagctctcggagcttacggggaatctctgggtacaagatcctacggcaggtatgaagcggcaggggtgacccggggccagaggtggactccaggcctcactcactcccttgttttgcctcttatcacctccagtcactggggccagtgggaaagaccttcccagagcgtgtggtgatgagcgtcccgtccagatcaaagccagccacctggtgtcaccaaggaaagacaaacagcagcactgtgatacctctgaccctcctcactcacaggctgactcacaccaaccctgccaggcagggtgttatcactgccatctcacagatggggaaaccgagtcacagagcacctccatctcaagcatccgtgatgcctctgagtggggcccgacatcttaaccttactgtctcctgttactccttatgacgccagccccaggattacagtctttaaaatgggggttaatgtcttacccagcctccttcttcccctggccttcaccacctcggtgggctaataaccgtgaaaataaaagcaggagcaaagctttgggtgctaactgcatgtcaggaactatgccacgtgctttttttatggattcagcatcgtagagatgagacacatgggactcagaatgtggtggtaacagcatttgaactcaagtctctctggacataaaaaatcctcatcgtaatagctcctactgagacagtcatggtcattgctgattactgggtggtcactgtgggtaacgcaggagctgacatatatcattctccccactgcttaactgcttacaacgatccctgcatttatcattaggcccatttctcagaaaagtaagtagaggctaaaaagttgagagcacgcaacaaacgtgggattgggtcccagtctgtggcggctccctcagccctcggcgtggccctcaccttgccctggggtttcaccccagctgcggtgaacactagcaacttctccaagttctcccagccggggtttgacttccgcatacgcttcttcggcagctcagcatctctcttctcatcttgggacaccagaggggtgccaggcggagtatctggctgggattctggtgtgcgggtctcttcccagcgcagggtcagtgggtggaggccattgaccaaatacagtgtgtcccccacccccagagagccctccaaccccggcttcaactcctgggtcccggtagttgaggggttaactcccagctgcagaaagagagggaggagctgggactggctccgcccccaccgggagcttcctccaatcaaatacccagcggaaaaatcagcccttctccaccactatcagacccttaggccccacctcttcactttggaacgggctttggaacggttacaggttttcagccttgtccgaatcttttttttttttttttttttttttcccctggagatataggcttgttttgtcgcccaggctggagtgcagtggtgcaatcttggctcattgaaacctgtgcctcctgggttcaaacgattctcctgcctcagctacccgagtagctgggattacaggcacccgccaccatgccccgctaatttttgtatttttagtagagatggggtttcgccat[139 bp omitted]ctgaaacaggcaacacttctttctttactggacacatccccttctctcccagccatattttttcttttctttttttgagacaggttctcgctctgtcacccaggctgaagtacagtgtggtgatcactgctcactacacccttgacctactgggctcaagggatcctcccgcttcagcctcccgattaggaactacaaggacgcgccaccattcccgctaattttttagagagacaggt[136 bp omitted]ctgacggcttgcaattcctccccaaatcccatccccaggccttgctggcccttgcagaggcactgatacctgtttcactgccactgtccgggtctcaggatctgcgaccagctccactgaggattggaggggtggagtcaggatttgcatccttgtgtgattgggtccctcatttctggggagtgtggcctgcttcaggctatagcatccagggagtaagaggcagtttatttctacatgggattggctccttgacatgcagtagccagatagtggcactaggattgcctgacactggtccttgcaagggacagggaggtacttttctctacagaattggtttcctccttgacaaaaaatgtggctagatataggtccggggcttggcctgttaccatccatcccaacctagcgacatttacttttctccacaggatcatttttctcttgacgaaggtcgtcgcctgtttctggatttcccgatggcctgagcatcatccgcgcagtgaacatcctccctaaatcggctcgatcccctctcccccaaaggatctagctaattctaaatcaagcacaaactttatcttcctgtactccctagagagcaccttccgacttcggggctggctgcaccactgcaatcccgcgtagcagccaagcgtccctctggattgttcccgcttttgcagcaggccacaccccctccagctcaggccccgctcaccttgagttctggagcacttccggtccgtaacctgggtcaggggtcccctgcccaggaccagggcttgcccgtccgagggcaggaagatggggggcgctcccccaggggggctctcgagccacaagcggcccggggcctccacctcgcccatcctgggtgccggcctggggagcaggtaaacgggcttgagcggcgcacagccccaatttgctgcaggaagtcccgcctcctcccacatccactagaaagtttccccaccattaactgctccggaagtcccacccgctcgccttccgcgggtcgacccgtttcccaggcgacgacgcgtgctccatccctccccgagttgcaatccccactttccagcgtacaggcagagagcctcgcacatgcctccgccccgccccgtactcacccgggaccgcggcttgggctcacggccacttccgaccagggaggtcctgcccgaggtgccccgcctgcaacccggccggcggcggtcggttcctcggcggacggaaatgactcgtcccctcgtgggtggggggcggggcctggcctcctcccacagcagccacgccccttccccgactcccggcccccagggtctctcggcagccctgaccttcatctctcttgctgcaacgcgaggctcaggccggtagcggggactggatcctccgttagcagatttgcctctttccaccttgacttctaattttcatcccagggaggaagatttttttcccatctgatggtcattgtcagtcgaggaaacctccgcccccgacagcgcccctaagtccttctttggcttcaccctcgatgttctagtttcctcatctataaaaaggataatcgtttccgcttcgtggggttaccatgacgattaaaggagctaacacgtgacaaaagctttaaaaaatgggtggtag[136 bp omitted]agcctcccgagtagctgggactacaggcgcccgccaccacgcccagctaattttttgtattttgagtagagacggggtttcaccgtgttagccaggacggtctcgatctcctgatctcgtgatccgcccacctcggcctcccaaagtgctcagatccgtttaagtcttatttagtgttagcattctttcggtagtggtctggtgggactacgtttacctagtcctaatttcggacgaggttccacctgctttctaacctccagccatttttttttccctttggagaaggggtctcactgtgctgcccaggctgatctcgacctcctggtgtcatgtgatcctcccgccttggcctcccagcgtgttgggcttataggcgtgaggcaccaagcccagttgctccagtccttttataatagaagactcccggctggagttcctggctttgctggtgaatatgtgggctctgtctccaacactcacctcctcaagattgggttccatggtcacataagactgggatgctctcctccacc[137 bp omitted]atgatgaaaccctgtttctactgaaaatacaaaaattacccgggcggcagtggcgcgtaatcccagctactcgggaggttgaggcaggagaatcgcttgaacctgggcgagagtgggaccctgtctcaaaaaagtaaataaaatgggcacagtaattccaacccccagctattcactgataatcagacgctgccattcggtttcagaaaatgttgaatgaacactcacaacacacttcacatttatctcagaggtaaaactctttaatctcagagcgcccctcccaactgccgatcccccaacccctcactctctcccccacaccagggccggagagtgagggcccctgccccccaccttgggtggacgagggccctttaaggcacctgtggaggtggggggcgaggggcgggagctggtaccatcctggatgcagggacgggcttcgattggcaggctgttgtggggatggatggaaccaatgaaagggggtgccagaggcagggacagtttggggccatccctgagggggtcagggaacaagttgtcgggacgtgggcaaagacgaccccagtccccgtagtgtaaagaacgtaaattgaaggccccgggccaattctgggaagaggagggcttggccacgcccccaggaagctggagccaattgggagggagaactcaggaaaagcggacggtgactatgtagagactggtcaagccctttacaggatttgagccaatcaaaaaaagagctgtccagcgactaggggatggagccaatgccgtgcgagcaaatcccttgtcgctaggcggaaaacaaaggagttgacccatttagagcttagaactcagcgagccaatcccttaatagaaggaatctgtcgctaggcggagagagacgacagacccaatcgggaaacgggacagatgccgctcctcggcgcggcaggtcgtgggctggaaggacggcggggattggcagaggcgggacaatcttgggaatgggagacgcaaggaggccggtcccggatcggcctcagattagcaggccccgggagtggggcgggggcgtagtgtgggacggggcggacgcggcccggggcgctccctccctggacttcaatatttccgcttcagcttctggaagtcgctggtgttaagccgcggccgtggcaggtccccgaagacctgggtgtcctcggcctctcgcagcaccagcgcgcgcatgctcgccgcgatgcggtccaggtcgggcgaagagggctgcggggacggcgacggggcgaggtcagcgccggcagggcaatccccctgcacccacacgcggtccaggggtgcacccgggctccaagcccacttctagcacgtccctgccctgccacctgtgccctgcgatgcccactgccagcagtgcccctccccgtcttgctccacgtaggaacccttctacccggttcagacacctcctccacgaagcctacctgcccctctccctctccccttcttggcctaggacattgcttcctacacagtggaagtgctgttgcctgctagccattaaggctgagtgcaccgtctcatgtctgaggatctgggctggggtttcagtcatgttccaatcagacctctgccgctgacaaactatgagcaagaggttttgcttccctaggcctcagtctccccttctgaaaaatggggcggataacagggtctctgtgagggctgagataatcagctgttactgccttatcatgtggccactgcgctacagaaaagatccctcgctgtgtcagcccccgccaaggagcctgcagttctggcacctagtactgcctccactacagcccccgtcacccggagctgggcctgtcccctcgcaggatgggacccggagacccagatcaggaactggacctgagcccagtgggagaccagcccccgggcacagcacgcaagaggccagagcattcaattaactgtgttgccatgagtcgcaagcacagagagcagcagcaggtggaccccgcccgcaccaggccctgttcctggtcttcagtgctcactgcttcattgagggaggatgcacagaaaaggtcaccactgtgactgctggtttgcatataaggacactgaggcttgagggggggactgtggggacccaggcctcctccctcaaagcccacagctccttcctgaaacacacctgggttccagtcccagctctgcctctcagggaagtcacatgtcccctcagtgcctcagtttcccctctgcttcagggaggctcagtgaagggtgaggaggacccacctaggccagcagagcccagcccaggagcttcaaacaggggttgctacaaggggtgaacaggggaccagggggtgggacaaattctgcaaagggctaggaatgtgcagggtggggatgggaggtgatctgaaccctccaagcctcagtttctccactggagggcatgccaaaacacctgtgccttgcccagagcaggtgttctataaatagagacgctcctggaaaggagaggccttctctataaggcactaggacacatggtaaggctgcaattgttaaaactgcaaggctcgtgtccaagaactcgcctcttgaggttgaggggaggattcagttagcttatgggtggaaagcagcatccatgctggagggcttcctggaggaggcggctcagagcccttccagctgccctccctacctccccacatttgcccctcaccggcccattctcctcatctgatgaccgcgcctctgtcctcttctccttgaagccccagacgggcacagacacaggcagggacttggcgtactgctgtgtgggtagggctgaggctgggggcactgagcaggtgggggggccggcgggggtctcctcgctcaggctgccatctgaaagagagggtggacttcagcttctgtccctgcctttgtgtcggccgtgtgcctgccctcaggtcgggaggggaacagcctgggacactcaccatctgtactctcggggtctgactcacagaaggggggaaggtcctggagggtggcgtcctcatccatcacaaagagccctgtggatgacctgagttagaggcccaggccaggcagcacctagccatgctccatgtgtcctcctcctcagccacggccactgccacagccaccacctccacctccctgaagcttctgagacccatttccttcacctcaaaaacaacttcctctagcagcctgcctggtcatcggcaaaaaccaacccagtttctatggatctgccaccctctcagctgcacacaacgggctgctaacatgaaacctctacgatctgttcgggacaatgtgactcaaaacacagccttagagaaacatgcaatgactatgacctctgtttcacaaatggagacctggaggcccagagaagttaagtcacttgcccgaggtcccatggctactaagggacaccaccaggatttgaactcaggatgcctgcccttcaccctacacgggttttctccagcaatggtgaggaggcctgccattggtaataacaacaaacaaggacctcctagtgactgatcaaactcctactaactccgcaaagccctagcgttacagtccagcctccgggaagtgcccgacccccaaattccccccaaaacagctggctgctccctccctggcttcctcagatgttggctgcatcccagacaactctttaactcctgcttggcctcccaggcgttgtggaaacgactctggttctacccatgacctgccccagagcctcccaacccccaccgggactccagttccttggctagaccgggagccccttgagaaaaaagcccgagcctgctctgtgtccttgtgcccaccactcccagcacagagctggccccaggaccagtaaggctcagagcagggaagggactggctttagatcacacagcaagccccaggcaagcctgtctggctctggggtcctgagactgcacttctgtagaagtactctgggctaagcaggcccccaccccgacaaagcctcctgcgggcacctcaagcgctgggccgcacccgcccctgcccccaccctctcacctccattatcactaatgcccagctgctccccggaggtctctgtctctgtgggctcatcctcgtcctcctcgttgtcctctctggccagggtaggccggggtgggctgggtgtgggactgggtggctgtggtgctggtgggggcgcaggaggccgagcagcagtggcagccctgtgggccagtgcgatgtcgtggaggcaacggcgcgctgcctccgccagggctcctcgaccatgggcagcataggcacaggggcccgggcggggtggtggcggcggggccgcggtcagcagcaccagctccgtgccagtccgggcccggaagcgctcagcggcccccaccacggcctcccacagctcctcggggcgccccgacgccatccgcgccctgcgggccagagcaggacagagggggctgaggcttggcggcctacatcatcgccacccactcagagtgcccgcccgtcccctggatggcactcaccaccctccacccaccttgtcccagcggtgctgtgtgtcctccccaaacctgctactccccaggattctcaccatccagtcctcgcaggcccagaccctggcgacgtcctctgccccaacccattcctcctgccccaagtcactgtactccttcccctttggccctgccctggcctctgtgggagccgccagccacatgtgaacagggagtactggaaaggcagggagtcctagcagagagtcctagcagagaggcctctaacaataaaacctgcactgggttctgaagactgagtacaataaagccgaacgagccgggcgtggtggctcaggcctgcaaccccagcactttgggaggccgaggcaggcggatcaccgagcccaagagttcgaagccagcctgggcaaaaaaaaaaaaaaaaaggaatttcatctgctttttttactcttttaacatggtgtctagaaaatttagaattccacgtggggcttgtgttgaatttgatggatgatgccaccctgctccgtcgcccagccatcccgtcaagagtgtcctgcacaaggcccagggggttccttcagcacccggagctgatgctactcctcgccatagtcctcagggcaggccctggaggctctaggtgttctggccatccccagctcctgggccatcctgcctccacggccttccagagcctctgaggcccgaggccttcagaaaacgtggtccctgaccttgatgacttgtgctccattccccaccaacctttcactcatcctagggtggaagaaactttccctcgcccatagatccagccagtctgctccatagggggtcccacactgtctgagtggccaccttcccagcacacttccttccagagggaactggctggttctatgactgaggcctcagagagtcggggctgaaatggtgctggcgctgctctctgtgctgggaaatccacacggcttttcctacaagactgttctggcaggtcctctgttgtccctgatcccccagggtgcatcagatgacttcaggagcccatccgatgccctgggcttcctccatgagcattcatgtcacctgagcttgtgacagctgtaacctggctgcctcctgcatcagactgtgaattcccccaaggtcagggatttgtgtttgcaggacaggtcggccctaagcagacaatgcagggtgcgtctccttactgggtgagaagagcgagggcaggggggctgggtccttgccctgactctgtctcaaacctgctgtgtgaccttagatggctcactggccctctctgtgcctcattttcttccccattaaccagcgtggttgagccagagctgctgggctgcggaagacgctcttccgggaggcagtaagcacaccgccactgcacggattcaggcacagctgtggtccagcccaccagggtgaagggagcagggagtctggagtctgaatgaaatttgcaggccttttatgactcacgatcattgatgttggtgtttgctgagcacctattcagtgctgggattccacacctggcatctcacctatctgactcactcagggagttcaaagccccaagggaaggaagaggtttatccaccacctcccagaagccacgcaaggacccaagatgggatcaaccttctcatcccaccctttcacctacactatgagacaggagctttagttacagttcaccccattttacagttgcaaactcaggcccaggggcagtcagcatcttgaagggccacaactggaagaggcagggctgggacctggactcagaaagtctagatccggggcctgttctaaatcctgaccgccatcctgcctgcctttaggagggcagatattctaatccagatggaaaagtgaggctcagagagcttaggacactggcaaaaaagcacacagctacacagggcacaagtggggctgaaactgtgaggctcagagagcttaggacactggcaaaaaagcacacagctacacagggcacaagtggggctgaaactgctgactgcccagccccaaaaccccactgaactggggggtacccggtgtctcaaacacacccatgtccttcccagctgatgagggaggaaactgaggctctaagcaagaaatggctggtccaaagtcaactgcctcgccgtgctaggcctggggctctcacttccacgggcctccagcccctaatgacatgcggagaagagggggagaggaggtcccggaagagaacgtcaggatgaactctccgtgtactcaatcttggagtagccacgggattaaagagtgaaatagggtgagtgagttgtgagggctcccccaactcaggagacatgagcaaaaaggacagggcgacttccacagacctctttgccaaggtccaggggcaccctgtaatgctacccaacaggagagtagccaagacctgggggtcctccttacccttcagcttctagaggaggtcctgtttcctccaaggagctgagagatggaggaagaacccgccccgatagacgagtttcgtgtaagatcagggagagattagaggaaagtgagacgtgttccccacaggagggggagcacgatgtggctgtcctctttggatgcagggaggagggaaaagagctaaggaggagaggggtggaaccacccctcctgtcgaaattttagtaccccacaccccaagatgtgaggaacctgagcatgaacgcggtagccatggggtgagcgcctggggccacgctcagctgccccgagacctcccaacctcgcccggggtccagggaggacccactggtctaggaagaaaacaggaaatcccgcccagacggaggccaggaccggaagtcccgcctttggacgggtgaggggcgccccgaggccccccaaaccatcccccgaccccgtggacgtggtccacggcccaggtagagatcccaggcgctctggaaccgcaaggtgagactgtctacgatttgcctcaggtctgacaggacgattcccacgggcgacccccttccagcgctcagcaaaggatcgctggcagacctctgccctctgatctgtgcaggccatacccctcccgtgagccgctcgccctcccagcgccccgctgcctcaggacggccaaatcctccccacaccgcggttaacaacgccgcctccactcacgtgcccgtagccagcatggccggcccggcgccgtcaccgccctcaaaagacatggcggcgccttgcgtcacgtccgcgcagttgccccgcctcctctccgcacactccgcctcccttatcggggccgcccgagatcaagatggcggccacaggggcttcatccgaaccagttgacaagggtgacgacagcttgcccctaagaaaaatggccccgcctagagcatttccatttgcccccaacaataatggccgtcctcatatgctcaatcatgaccacagtaaacgaaggcaagcgacctgacgtccctgacccacaataaacttcttcgacaaaagtagaggaaatcggtgctcgttaacaacatggcagccaaccgggcttaatcagcccatagtgtatattggctctccctccctccaacctgctcccattcggcacgaaggctggcaaagatccaacacggcagcatttcttgcttcggtttgccaggcttcaaaatggcggctcagcccgctttctcgcgacggtgactcagaaattcgtccggggccgcttcgtttctgggggcactgacggcttcatcccgttatcctgagtccctcagtgcctcttgtggtgtacagctcctctcacctcctcttctcttatccgttcggctcttccagctgtcgcgccccgcagagagatgggacagccccgtattaacatggccttagctgaccggcttaggccatgccctcgagcaaaatggtacctccttggcttcaattccagtatacaatatggagaaggaagtgggcgtttcaaggcgtgcttgccccaggtggtgcagctctcagaccctcccacttgtttacttcgtggcgagagggcgaacactgcgcctgcgcactctccgtagccggatccaccttcagcgtctgcgccacgtgactccgatccaccctcgaggttccagtggaataacccccttctgaaaaatggtttcacccgctccttctctagaacgggtcgggccgctaccactgtccggcccggaggggaactgttttctccggaagtgacaacacgctgactaggaaaaggaggaggcggggcagtggggccttcggcggcgactatggaaggagccggctacagggtaagcactgaggacgcattccctcgcttcagtgtatgcgaaacgccccgtctagtgatcagctcttctctcaggccttggctctcgagaatccggcacggccttggcaaacaccgatctcttataaacgcgccgtcaccctcccgtccaccgccccagggaagaacctcccatggccccgcccccccggctcaggcgactccttgagccctgccccctgtggaacgcacgtcagcatccgaacgcgggctggaccattctccccgccttggtcccggggcaatggccctcccggccccgccccctgagggtggctcctccctgggcccgtccctattggctccccaggctggtcccctcgcttgggccccagccctcgctggttccccccaactcaggtggtgtttgagaagggcggagtgtacctgcacaccagcgctaagaagtatcaggaccgagactctctcatcgctggtgtcatccgtgtcgtggaaaaggtgcgctgggagggagcagggctcggacccgctccgagcgggatgcaggcggtctgggatgcaggcggcagctgtaggagtttggtctggcggtcagcagtgggacctgaagaaggctgggtgtgggaactggaatgaggggcgggactttgaaaggctgagggtagaaactgggaaagtttggaaatttgcaacggaaagttttgggaatgtggtttggggagcgcctctaaccccgcctccctccttaccctaggacaatgacgtcctcctgcactgggctcctgtagaggaggctggagattccacccaaatcctcttctccaagaaggtaggctccacccgctttgcccttctccactcgctttttttctaggtccgtgctgttgtaagtcatttgagggacctgcgtacaatcccagacctactcgtggggcatgtgtgaccctgtttaggcttgggtactctgcctctccttttgctcctctctgtgaaatgggcagaggatgcccattcaaggaaaaagagcagggagcataagacgcacggtcgtggggacggctgacccctctctccctttgcttcttgggagatccctgccagggtgcaagatgtggattcgagttgcttgaagggaaatggcatttcctctggtgccagaggacagggcctgacagcctactcacccacttcgtcactgctcccggctttcccttcgttatgtctcctgggacttcccatggctggaccccgtcctgggcaattctgagacccagagataagtcagatccagacccacctaagccctgacccttactcactttttgagaaactgatagatgaggtcgaaaacgctaggaagtgttggaactttttgcacccagacagtctgattccagatccccaacgcttcctgggagagcagacatttgagctgggactcccaggatatgaaaggacaagaaggtatttcagggacagcagaacaaccttcaaggcacacggagaagttggatgcctctgtaggggggttctttagtggggaatgagacctccattggagctgatgagttccacccaggggccggaagtcagtcggcacccacagagctagtgacgagacactggaaggctgagctgaccacctgcgctgccccagggcaggaggatgaagatgaagatgaagatgactctccaccttgctccacagccaaacacagccaaggcaccaggaagttgcgttacatcacttccgctttccaggttggcctgcatctggttggtagaatttgtcctgtgtcctggattccagctgcaaagaaacctgggaaatgtagtgtgttttttttgttgttgttattgttttttttttttttttttgacagtctcactgtctcaaaagagtgcaaagtggtatcttattgtggttttggtttgtatttacctggtgagtacaacagtgtccattgagcactccgcagcctgactgcagagccacctgctgtgtagcatggacctccccatgcagtgggagacatggggtcaagtcctggctcgctctctggctgcattgggtgaccctgagcaagtgctgtactttcttttttctttttttttttttttttttaatgagacagaatttgctcttgttgcccaggctggagtgcaatggcgccatctcagctcactgcaacctccgcctcccaggttcaagcgattttcctttctcaccctcccgagtagctgggattacaggcatgcgccaccatgcctggctaatttttttgtatttttttagtagaaacgaggtttctccata[142 bp omitted]gctatcttccagggtagcctcgaggctaagatctgaatccatggccccttactgtctgctcctttcctctcctaaggactccagtgggggtgactcatgtgcttctgaggaggaaccaacctttgaccccggctatgaacctgactgggctgtcatcagcactgtgcggccacagctctgccactcagagcccacgagaggtaggctgaggtggcggcccttgagaagcacgtgtgggccaggtaggacacatcttgccctcagtggtcacggtcccaagggctttgctgcccacaatcaagaaggccaccagtcaccaccttccagtcccaggagcatggaagtgaatgggaagacaggactgtcccagcccaggtcaacatggccagtgtctctgagactgcagccttgctcatcctactgggctcccggattggctgtgggtgctcccacaccaggcctgcccctgaggttcgaggctggtggggtgacagatgcagccagttagggtgatttgcaccatcctggggtcacacagggtgcaggggacatccagagaaggcacgtgacccctctggggaatggagattccttccaggaagaggtgatgctggagcttggcactgagggactcttgggagttttctcttctggcagagagagcagcccgtgcaagccagaggcaggcggcccccgtgtgtttagggagccgctggcctttcattgtagctcaagtgtgggattttgagtgaagaaaggttggaggtaagataggcaggggcgaaggacagacccgaggggcctcgagtgccaggttgaggaatagggcccttaccctgcaggtcgaggggtgcctaggaaggttctggaaaggtacatgtccactgggcccccttcccatcttactcatttgtgcttccaaggaatgtgaggccaggggcagaggggtggcttgtggcggggccctcaggagatgcctgtgccgaaggaacatcctgggttgtggttgataaggctgactctggcttcccacgcgcttcccccaacacagtgccgtctccctaggtgcagagcccagctgcccccagggctcctgggccttctcagtgagtctgggggagctaaagtccatccgccgctccaagccaggcctcagctgggcctacctggttctggtgacccaggctggaggttccctgcccgcactgcacttccaccgcgggggcacccgcgccctgctccgcgtcctcagccgctacctgctgttggccaggtgagctctctcccagtgctgggccttaaaccgggcccagtcccaccatggctgcagcgtgacccctcggggctgtgaaagaaacacaactcacactgatttaaaggcaggcaaagagttgaccagcacatataactaaaaagtcaaaaaggagtattgatttcaggcaggacccaggtcccaaaatgttagaaacagttatcctttttccctctgagttcgttattctctggggccccagtatccgtggcttaacaacccggctggatagaaggcacctctttccccacgttccaacaagatcccagagctgcttctcattggctcgtccctgagtcagtcacactggaccggaaggtgaaaggccctcattggccagccccgagtcatgtgcccacccctgggatccagctgtgggcctcctttaacagcattccctgaaatgaggggttgcccaggggtggttgggacgctgcagctggaaccgatgtcggccgagcacagacagcctgggacactgggcccctacctgtgcatcacctgtgcgtcacctcccgcctcccagctccccgcaggactcccgcctctaccttgtcttcccccacgactcctctgctctctccaactccttccaccacctgcagctctttgaccaggacagctccaatgtggtgtcagtgagtgtccccagcaggaggcctggcgggtgtgggcagggagggacgagaaggggcgggccgtgacctccctttggcctcgtccccagcgcttcctccaggatccctactccaccaccttcagcagcttctcccgagtgaccaacttcttccggggtgccctgcagccacagcctgagggagccgcctccgaccttcccccgccacccgacgatgagcccgagcctggattcgaggtcatttcctgtgtgagtagtgagtggaccctccctgttatttctggccgtgtctccctgggcgcatgatttcatttccctgggcctcagtttcctctttggtaaaacggggatggtaatgggacaccctcagggggtgcatgaggaaagcgctcatggctctgccagacactgtgagcacctgctcacccttattgggggacccctcctaactgggggatgacttggctgctgagccccggaagaggctgctgcctgcccctgaatgttagtcatccgtcaagctaataagctctctgagcttgtggactgaggctgggttgggtccccccaccaccccgccgagccccaggctcatttgctctttgcctgcaggtggagctggggcctcggccaaccgtggagcggggccctccagttacagaggaggagtgggcacgccacgtgggccctgaaggtcgcctgcagcaggtccctgagctgaagaaccggatcttctcgggggtgagtgccaggacaggtggaagaatggggcagggccagaacaaggccccactgagctgcctgccctcctgcacccccagggtctgagccccagcctgcggcgcgaggcctggaagttcctcctagggtacctcagctgggaaggcacagctgaggagcacaaggcccacatacgcaagaaaacgtgagttctcaggaggccctgccctgccaggcatgacacctggtacctcctagggcaccaatgggcaagttctgtggacgctggttgtgaacctgctgtatctgggcaccatcctgcgcctgtggaatacggcaatgatcaagccagacccatcctcacccctgtatggtctgtctccattgcagttttcattcctgtgccatactgttttaatgatcacagttttgcagcatgttttataacctaggagggcccgtctctcctcattcctggtgtaggttatatacctgccaggcactgaggatgcagcagtgctggacgattccctgtccctggtgccctgtccagtggggggtgacaaattttcatcaaaaggccacaaggctatgtagtgagagatgccaggaaggtgaagtgtaagggatagtggcaagaatgacgaggtgacctgcttgggtctgtgtggtcagggaggggctctgcagggctgacctgggaggtggcgccaggcttggaggtctctgggtgttgcagacagtggcggcctcacatcttgtttccctctgtcactcagggatgagtatttccgcatgaagctgcagtggaaatctgtgagccctgagcaggagcggagaaactcacttctgcatggataccgcagcctcatcggtcagtgtcaggggtggcacttagggtggatgggagcagggaaccacaggagggcctcaggcataagtgcgagtgggagatagagggagccccctgcctccccaagaccagtgagagggcatcttgggggaaagctgcatgggctgttggggaatggccctgggggagcaaggccagggacaggatgggaaagaaggggagcccagctcccttcaggcccagtctcagttctgtcaatgcctggtgatcttggcaagtgattttgcctccctgggcctcagtttcccctactgtgggaggatatagccagctggtgagtgggaggcctggcgcctcacagcaggagcatcagtgatagtttctagaaccagctctgcttctcccccagagcaaaccccgaggctgggggctgccagcaggaggagcagtgggggctggcactggtggccagcagggatgggcccccctacctttctcacctttgcaccctgtgcccggtccccgcagaaagggatgtgagccgcactgacaggaccaacaagttctacgagggtcccgagaacccggggctgggcctgctgaacgatatcctcctcacctactgcatgtatcacttcgacctcggtgggtgccaggcctggggacgggcgtggccggggctgtccaggggagcgctgcgggcttggctgcagcctgaccccatgtccccccaggctacgtccagggcatgagtgatcttctctccccgatcctctacgtcattcagaacgaggtggatgctttctggtgtttctgtggcttcatggagctcgtggtgaggcttgggtcaggggtgggacacaggcctatcgagcgatcaggtgtcctggtacctcacggggtctgctctttcccccctccttccgtcccacagcaagggaactttgaagagagccaggagaccatgaagcggcaactcgggcgactgctgctgctcctgagggtgctggaccccctgctctgcgacttcctgggtatgtctctcgggagggtgggcaggagacaatggggccatagaccttgccagattctctggtagcagccacagtggcatcctggacattgggtcctgatccaaacaagagaaacatccccacacaacctagaatgtagaggcagaattgctgtttgaagcaaaacttcaccaaatgcagacacgcaggaatgctgactcaccccgtcctcatgctcacctagatcctgtttgggctttgcctttggcttaacctgcagggtatttttcagaaataaggacctaggcattcctgccacttcttatccccacctggctgtggctcaccttgaaccaggaatcagagactggttctctgggccctggggctgggggtgctgcatcccagctttaacatttttattcttcgaccaggcacagtggctcacacctgtaatcccagcactttgggaggccaaggcgggcggatcacttgaggtcaggagttcaagaccagcctgaccaacatggagaaactgtctctactaaaaatacaaaattagctgggcctggtggcacacgcctgtgatcccagctactcaggaggctgaggcaggagaatcgcttgaacctgggaggtggaggctgcagtgagccaagatcacaccatggcacttcagcctgggcaacaagagcgaaagaaactccatctcaaaaaaaaaaaaaaaaaaaaatatattctttattacttggtcaatgtaaaaactgcaggaaattaagatgaagaagaaaaagtaaggctgggtgtggtggttcatggttgtaatcccagtgctttgggaggccaaggtgggaggatcacgtgagccaaggagtttgagaccagcctgggcaacactgggagaccaaaaaaaattggg[132 bp omitted]tagcaaaactctgtttctactaaaaatacaaaaaaattagccagccgtggtggcgcccacctgtaatcccagctgttgggatcggctgaggcacaagaatcactcgaactggagtgggggaggtagcagtgagcagagattgtgccattgcactccagcctgggcaacagagtgagaccttgcctcaaaaaaaaaaaaaaaaaaaaaaaaggtcgggtgtggtggctcacgcctgtaatccagcactttgggaggcca[134 bp omitted]gagacaggagaatcacttgagccaaggttgcaccactgcattccagcctgggcgacagagcgagactttgtctcaaaaaaaaagaaaaaagaaagttaaagttgctgtttgatatcattgtttttcttgagtgcagatggtgatgataataagttaaacttattcatgaacatttcctcgatgctttaggacccccgggggagggagctgagatactctgtcctcaccttactgatgaggaaactaagccatagaaaagcatcacctcctagggcacaaggacagaggctgcctctgggtcattcaaagtcttctgaaacatcacttttcttgactgcgcggcattgtgtccacctgcaagatgtggtagatttgatgtaacttgacctgctggagattcgggtcctttgcagtttttcatcacggtgcatagtctgggtaatttcttctttaggttcacttccaagaagtggaattttgttcaggacagtgcttgttttcacacagctttggagagtttgtcctccgttgttactttcctcaaaggttagaatgctcagactctcactttcatttgagttaacttggggggaaaaaaaggttcaacaccagcttaattttttttttctttttgagatggagtctcgctctgttacccaggctggagtgcagtggtgtgatctcggctcactacaacctccacctcccgggttcaagcgattctcctgcctcagcctcccaaggagctggaattacaggggtgtggcaccatcccagctaatttttgtatttttagtagagatggggtttcaccacgttggccaggctgtatttttagtagagatggggttttaccatgttggcctggctggtctcgaactcctgacctcaggtgatccacccgcctcaccctcccaaagtgctggggttacaggcgtgcgccatcgcacccggccttcagcttaaatttttgctacagcgtatctaggagtgtcagttcccttagcgctcaccagcagcgggcagaggtctgtttcgtcgggcgtgctgggcgtcctgcctcccttccatgtccatggcagatgtggaagtataatagcacacttcctctggagagtgggaggaaggaggggcagggcccgcgttcagggctgctcctgcctcacctccgaggttccccagccaggcataagtcacttgcctagacttggggaaggtcttccagtcaggatgacttctcaaactctcagtcccagcgctgggcaaggctgagtgggctccatgtcatcccccagattcccaggactccggctctctctgcttctgtttccggtggctgctcatctggttcaagagggaattccccttcccggatgtccttcggctgtgggaggtgggccagccagtttgggcgagaggcctgaaggggtgggctcacctgccctgggaggttgggcggagagggacagaccctggtgggacctcaggcccaggctgggctatgacctccctccctccctctgtcccgcaccctcaggtgctgtggacagggctccctggccccaatctgcacctgctggtggcctgcgccatcctggacatggagagggacaccctcatgctgtccggcttcggctccaatgagatcctcaaggtgaggctccggccccgcccccgccctgtcccccctgagctgggcgctgcccagggccgcagtacctccggggagcaggtgtttagtgtgggattattgaaagcctggttagttgggagcgcagtgggggtggggccgcgtaggtttcccttctgccccatgccatgcctgctcccagcaaggtcctccgggcaggtgggtggggaccttccctccccgagtacgtgctcagaatgctcccggaggcctgagaagcatgtctcgcccagcgcacttctgagcccccagagggccagcccggtgtgtcttcattgtttcccagcacgaagcacagagtgggcgctcgggcggaggtggttgagtgccgactggcgcctgacccaccccctcccgcagcacatcaacgagctgactatgaagctgagcgtggaggacgtgctgacccgcgccgaggccctgcaccgccagctaaccgcctgccccgtgagtccccgtccgccccgcagcgccccgcccgaaccccgaccgacccccgcccccttctcaccttcaccttccgcttttcgcttctctcatcccgtgcctccaggagctgccccacaacgtgcaggagatcctggggctggccccgcccgcagagccccacagcccctcgcccaccgcctccccgctgcctctgtcgcccacccgggccccgcccaccccgccgccctccacggacacagccccgcagcccgacagcagcctggagatcctgcccgaggaggaggacgagggcgccgactcctaaccccgccaggcagcctcgttctgcacaggcactttagcccgagccaggcacacctgcgagggggcaggtgtgctccgccgccctgctgataagctggcttcattaaactgacacttctcatgtgcagttggcttcttgttggtggggggaaggctgccaagtgggctctgacctggttgaggaggggatggtggctgggcagagcctagggtgaatgattggggtttgtggaggcagggcttcctgagttgcctgatttgtttttttgtttgtttgttttatgagatggagtcttgctctgtcgcccaggctggagtgcagtggcagatctcggctaactgcagcctccgcctcccgggttcaagcaattaccctgcctcagcctcctgagtagctgggactacaggcgtgtgccaccacacccggctgatttttgtaattttggtagagatggggttccaccatgttgcccaggctggtcttgaactcccgacctcaggtgatctgcctgccttggcctcccaaagtgctggtattacaggcgtgagccaccgcgcccggcctgatttggggtttttggaagaggatagggtgctctgggctgtggcggcgacctggtagctgtgtgggaacacttcccggacataaccaaggtggaagggcctgcagagatgcactctggggagcctgccctcccagctgctgcttgtgagaaaaatcacctcctgttcagccactgtcagctgggctttctgttacttgcattagggcccatctggacttcagcctcgtgacagaggtggtcgctgtgattgccatttcccggtggtgcagggcgtccttccggttccctctgtgcgcaccaccccccaccctcctctggagccccactgtccaggaagaagtgaggggcagatttttgggggggctccaggatgggcgtggcgcctgctaactgcagggctagtggttccgatgcaggcaaactggggaagtaactgagccacgggggaggctggaccacacggctttttccgaaaatactttaatgcgaggtcctcgtgtgggtcgtgttttggagagataactggccttggactggagggtggctgccttcttcctttgccaggtcatgcgaggggctgctggccaccccatgcacatgcccctgcccctccatgtcagatgcgtgcccctcggggctggccgtgtccgatgcaggccccttccggctgttgatcttgatggcggcgcgcagcgccgacttgaccgccgtctccacccagccgtgcgggtaggcggtgtgctcgccggcaaagtagatgcggccataagggaccgtccagtcatccttttcggtttgccagagcgccggcggctgtaccacaaagccaccctggctgtgctggtcctccgcccaacgcttgacgacgccggtgccgtcccagagctggcgcacgacaggcccgtgcaatgccgccacgtcgtcgagcgccaagcgcaacgcctcttcccggctcaagccggcgaacgctgccgccgcgtccgaccacgtgtacgaggccagcagcagcgcgccctcgcgcggcggcgggtagaaaatcatgcgcgacgggcgatcggtgtttgagtggccgccttcaatgtgctcctcgcgccagaagggcctgcggaagcttaggaacaccttggtggccggcacgtagtgcagcctccgcagcgcctcctgcatgtggcggggcagcggcggcgagaaggtgatgcgcttcaccgccggtccgctcgccgtcagcagcaccacgtcggccttcagcaccttcagattccgcgccgggggagaggtctcgatctgcacgtgcacatcgtgcggtccctgggtcatcgccaccacgggcgcgttcaacagcacaagcccggacagcgagctcagcagcgcgcgcggcagcaggtcccagccacccacgatgcggctgtacctgcaggcggggcggggcggggtgggggcgtgacctgggctctgcggccctgcccctctgccttgccccacccaccccggcagctggcccttatgggcaccggcccgctcccccgtcatccacctctcccgaccccgcccgtccctgacatcccaaaggccgcaggagtagtggattgtgtcaccagggaccccaccacttctcccctaggccgtgtcctttatctgggaacccttagccccgcgaccatcaattaggccacgcccttcacaacagccccgcccccagacccagaggctcctcccactccctgctactttccctgattgccccccgccccccccccctgcccgccagccccgccccttactggagtctgtcgctgaggcagctgtgggcccggagggcctcggcgaagctgagatagaagaagccatcctcggacatcacgtctcccagaagctgcacggccggccggctcaggttcccctccccgagaagatattcctgcaggttgggcacaggccgaggttagggcccaggcaggctgcacccctgagagagcccctccgcagctgggcctcctggtcccatgacatgtccttggaccgtaggatcctgtccccactctctgacagatgagggaaacggaggtccagacagggggcgtgtccagcccccgggtcaggcaggaaggcggtggcaggactagggtgccaggtacccgccttctgactctctggggaaggcctcatggtcactctctttgccctgcatctcagcagaaccaagatccccacttaccaagagcgtgtgcctttcaaacttcttcatcgcctttctgcagcccagtgccttgaggtctttgagggcctgttgtggaagaagcagacatggtgctgagctgcccgggcagccagggtggaggccgggcctggagcccacactcggcttctcctcgtggttctgcccacggctggccattcaccactctcaagcccctgggcttttgcccacaccatgccctccgccttgccctccacggcaactcagatgccactgctcctccgatattaccgaactgttaacgccgcccatcccccctcattcggctggcccggctggtcacagctcatcccggttgcgtgttattttgcctatttttcagccagccagccagactgtgagctccatggaggcagggatgtgggcagctggagaggagactgggagagggtcccaggcgtgctgtgtcctcccgggggctcagtgattatttgttgcctgaatcactgtggccacggacagaagctggtcccctgtgccactggtcagtgctgacagggcatgatggctgagaagtttatctaccgtccgtcccctgcccacagccctcctgtagctccccagtgcctggagccacagaattcttgcccctcagcctcatgttcaaggcccctgctagcccctcaatgtcttttttttttttttttttttttgagatggagtgtcgctctgttgcccaggctggagtgcagtggcgccatctcagctcactgaaacctctgcctcccaggttcaagtgattctcccacctcaccctcccaagtagctgggattacaggcgcctgccaccacacctggctcatttttgcatttttagtagagacagggtttc[142 bp omitted]ctctctttgccctgaatctcagcagaaccaagatccccacttacctcagtccatgtcttttatggcagctctggttctgtgaacagtgtacagtgcccagaccacctgccctcagggctctcccacctacacatctggcacctattgtttccctgcctgtctttgcgtggcacatgagtgcgtgttcttcagcactttgttcgaatctcaccccctcccagaagccttgctgcccccatctaatttcagccttcttcttggtccacctggcttcccccttctggccaggacctcagagggaaggcagtgccccttcactcactcatgcatctcgcatctctcagactcccaaaccagtcagtgtcaaggcatagaaatgacctggacatggcccccatcctggtctagaaggggagatgggcaagtgggctctgacctgggtggggaggggatgttgggtgtggccagttcctccctaaaggtatcagggaaggcttcctggaggaggggacattggagctagttcttgagggctgagcaggagttcctgtgtggggaagggaaaggcattctggaaagggagggtgatacacaggtatagtgggtgtgaggaacacagagctgggggcatgtggaccaccatgaggacaaaaatttcttagaggagaaaagagcatgaggctggaggggtgcagaagggaaggccagtcagggctcaaagctgagcctgaaaagatcagactttgtcctggaggcagcggggagccactgggggctgtgagcagcatcactctgggtgtgtgggaagacgtttctggtaccaggctggggagactagagcctgggcagcttgagaggaggctgggggagggtccagggcagaggaggaggcctgagctggggcaggcagaggggagcagggcacaagcgtcaggcggcaggggtgggcactgatggtgggggaggtgggcgaggaggaggtcaggaggaggatggctcctaggggtctgcccgtgactgcgggatggtggggccatcgtgagatgggggcaccgggaggaggaacaggtttaggggaagcttctgagcccagtgtcctggggagggacacagatcagggtctcgggaggcagatgtctccatcagcccatggatctatgtttaagccagaggtggagactggggaggttatccaggacagtgtgtgggtgaaaggggaagaggccaaaagctgatgcagctttggg[136 bp omitted]tggtgaaaccccgtctctattaaaaatacaaaaattagctgggcgtggtggcgggcgcctgtaatcccagctactcgggaggctgaggcagagaattgcttgaacctgggaggcggaggttgcagtgagctgaaatggcgccattgcactccagcctgggtgacagagtaagactccatctcaaaaaaaaaaaaaaaaaaaaaaaaaagaagggagttgagagatgacccatatgtgtagaagcccctgggctggcccattctcattctcggatttcagtgagtaggtcagtggttagacctcatggcacacatccccttggtagaatttccatctccaccaacaggcgccccaccccatggaggggactgaagggatgccagagagaagaaaagccgggccggggcgagcttaggaggaggacagagaagtcagggcgggaggagggtgcaggcggtacccacctggttgagagccatctggtagatgtcttcgggcgagtggcccttttcctggggacgcaaggcgtagcccagcttctcgggcaccttctccaccacatagttgcgcagcttcacttcgtgcacctccgtccacgtgttcttgtcgtactgggtgaacttggtcaggttgagccccaggccctggcagagcttgtggaggatcctgatcaggggagtgggtgagtgagggccgggctccagtgggggtggcctggtccctagtgggacttggagaagaggggtgggaggggagagtagctggggaccagcatgaggctgggggtggggctagatttggggtaatcaatgctgggggatgggaatgaaatggggacaaggctggaggcctcagggcagtaccaggattaggattgggttaagagtgggatagagcccagattagaattgggaagggggacagagtttgggttggacgggggtttgagatgaagaaggggcctggggctggggtgcctgagggtgtggggatggtggagctgcaggcctggaggggccagcacaggagctggcttttgcaccaggcagggccagctggaggtctggttggaccaggtggcccgagtgttgccagaggcccagggctggcgctggaggcaagactgaggtgaggattaggcgaaggatggggttggaggctgggtttgggagtcagagtggaagttcgggcccactctggtgtgggcatggagctggggggctagttgagtctaggcacacaggtgggtgggttgctaggtcacctgtgagagctgggcatgcgcatggctcccagctccccaatccagcccgtgttctggtcccggtaggtgaagatgcggcccccgatcctgttatctgcctccaggatggtgacctgagggagtccgtggggcgaggagggcccttcagctccacccactgaccatcccctgccctctaccaccccgtgccagccccctgccttcttccatccccacagtggcccagacccagactaggagagggtccccttctgtatggaggtgggggaacagaactgagtgagcagttccagactgcaggaggaaggctgccagctagactgcaaagggacttcccagctcggggagttcggagatgacccatatgcgtagaagcccctgggctggcccattctcattctcggattgcagtgagtaggtcagtggttagacctcagggcacacatccccttggtagagtttccctctccaccaacaggcgccccaccccaggacagaggagctttgagccagtgagacttccctctgggatgaaaaacgtgggacaggaaagtctggggcctctcagtggagacatgtgacagcagggggcttgggcctcacccccagactacagggaaagatagcctctccccccacatccccacctccaccccctcaaggaggaacgcggccgtgtccctgtgcccagggactccagcctgcagcaggagggactccaggtagactgcaagcagtgcttcccaccttgtgtccagcatcgctgagcaccttggcggccaccagcccggccacaccagcgccaaccacaatcaccctctggggcttcagggtccgattgagcccccaggtcaccaccttgagcagctgctcatagtcaggatcctgcatgcatttctcgaaggggtcttggctgcgttcagccttccagtcctgggaggccaccaggctgaggaggatggggacgaggacgaggaggtgcagggctgggaggaggaggacagggtcaacggggttgtggcaggtcgggggagaggggttctactcacttgttccagagcccctcccctgcttactcacccaatggggccatgactctcggtgggagatggtgtctggggtggaggagaagggagggctgttgtgactgaggcctgtgaccactgtagcctgactctgtctcccatgggctgcccagctgctagagccggccctcccccagtcactgtcctgctctctggacctgtgtcccctaaccccattccttcagagtcccctggaccgtccctgcctccctcctcaccggtctccacctctgccacagctctctcgggttcctgtctctttctcttcttttccctctttctttcctttctttcttttttttttaacagtctttctctgccatccaggctggagtgcagtggtaagatcttggctcactgcaacctccgcctcccaggttcaagaatcctcccacttcagcctcccaagtaactgggattacagacacccataaccaaacctggctaatttttgtatttttagtagagacggggtttcgccatgttggccaggctggtctcgaactcctgaccttaggtgatccacccacctcggcctcccaaagtgctgggattccaggcatgagcccccgcgcccggcctcttttccctcttcctcatctccccagctcctgactgcttctcagtccctatttctgtgggtcctgtctctctgtccccccaccactggccgtgtcactacctccagctcttggtgacagcaggacagcgcggtcctctccactgccctccactgtctctgctgtggccctttctctccccttaaactggcagagccccgcccacccctccttttgggaaactggccgagggaaatgaaactggtttcctggagctgctctggtccaatgctcagagtctagttgaggttggagaaagggggttggaggaagttaatcagtctattcacttccttttgccccagatagttctggggtggtttggaggccagaaatagatgctcaggtaaccgtgccaacaacggggaatccccttcggtttgcccccgtccctgatcaccaggccacttgtttctatcctcccctgcactctctctgcctccttgattcccacggggacagaggggctacaggtccctgggccaggccaactttcccctccaagtccctctccgtcaggtgtcgccatgtcctgcagggccccccatggttccacttccctctccacttgccacccagagcctcagtctccccctccgttacatgggtgtagcagtggggctggcagccgtggtcccggggtcaggacgtgggctctgagcccgccctcccctctgtggctctcgtctacagctgtcaaatgacgtctacagacgtcacagtgttttaggatcaagtgagtgaatccaggttaagttctgtggccggaacctggggtagtactggaagctgctcctttggaaatgccagctgctgtggccgcaggggcactcaggggttctatgagtgaccacccggcagagggaagcgcccaggcttcacccatccctgctttaagaaccacctcagtgctcagggcagggagtggggcggcaccttggagtgggtgggggtggagaaacaatagcagggactttccttggggtgggggagagggagccaggggctccgtgaggaggaaaaccagagggaggcagattctctgcagcaagggttgggtgggggttggagggcattaacaagaaggaagatgggaaactcccgcagtaaatcaaagagggatgcggttatggccgggaggggctggggggtgaatgtgagtaacaaggcatgtgacgcaggggcgggaggccgtggcaaagggaaatgatcaaagagctggagagttcagggaccgaaagagcttgggtcagcaaaaatagtgacgagggccaggggtggctcacgcctataatcccagcactttgggaggtcgaggcaggcggatcacctgatgtcaggagttcaagaccagcctggccaacatggcaaaacctcgtctctactaaaaatataaaaattagccgggcatggtggcatacgcctgtagtcccaactactcaggaggctgggacaggagaattgcttgaacccaagaggtggaggttgcagtgagctgagatcgtgccactgcactctagcctgggtgacagagccagactccatctcaaaaaataaaaaataaaaataaaaaatagtaatgagggccgggtgcggaggctcactgctgtaatcctagcactttgggaggccgaggtgggaggattgcttgagcccaggggctcgagaccagcctggccaagatggcgaaaccctttctctaaaaaagaaaaaaatagtgacaaaaatgttcccatggcgatcacctgccttggaggccgcctggtgctcagggctttgcacccatcgtaagcctcacaatgcctgcatttgaggccaggcacagtggcttacgcctgtaatcccagcactttgggaggctgaggtgggcggatcacttgaggtcaggagttcaagaccaacctggccaaaatgatgaaaccctgtctctaccaaaaatataaaaaattagccaggcgtggtggtgcacacctgtaatcccaactactcgggacactgaggcaggagaatcgcttgaacccgggaggcagaggttgcagtgagccgagattgcaccgctgcactccagcctgggggacagagtgagactccgtctcaaaaacaaacaaacaaacaaacaaaaaaccaacaacaatgcctgcatttgatagttgaggaaactgaggcttggagatggcgagagggtgggacaggaggaccctggggcacagagaggggaaaaggcttggcctaggtctcagagtttcattcacagcgacatgtcaagtatgaacgcggcgggattggggccttattcgcctgtgcctcgacctgggtcccacagtggggaatggcagtgctggcattcctcaccaggtcgggtgggccccaggtccccggcccctgcccaatagcttgttcagtcctacagccgcataacagtggaaacaaccatggaaaggtgtggaggcccacagccaactggctcccagggcatgtcccaggagtttttgggtccccagagtgggtggggccctgcaccaatccccttgtccttatcacagagggttgttgcacaaaactcctctggccccaggcatatgtgcagctcaccttgggggacttctgggtggttgttgttgttgttttgagagatggggtcttgctgtgtcactcaggctagagcacagtggcacaatctcggctcactgcagcctcaacctcccgggctcaagcaatcctcccacctcagcctccctagtagctgggactacaggagtgcactaccacacctgttttttgttttttttgttttttttaattgagacggagtctcactctgtcacccaggctggagtgtagtggcgctatcttggctcactgcaagctccacctcctgggttcacgccattctcctgcctcagcctccagagtagctgggactacaggcacctgccaccacgtccggctaatttttgtatttttagtagagatgagatttcaccgtgttagccaggatggtctcaatctcctgactttgtgatctgcccgcctcggcctcccaaagtcctgggattacaggcgtgagccacctcgcccggccacacctggctaatttctgtgctgtttgtagagatgggattttgttatgctgcccaggctggtcttgaactcctgggcttaagcgatcctccagcctcagtctctcgagtagctgggaccacaggtgcacaccaccatgcacagctaaatttttgtactttttcatagcgacggggccttgctatgttgcccagcctggtctcaaactcctgggctcaggtgatctacctgccttggcctcccagagtgctgggattacaagcatgagccactatgcccggcccctttgagcttttttgtgcatttcacatcatcttcattcagcatgtattacttttgtaattaaagaaaaaaaaatcccaattaatgttagtttgaagcaatacatcagacaggccaggtgcccccagtgaagagcagagggcgcaagtcagctggttcaggattgatgcctttccagaatgctctgtcgcccaggctggagtacagtggtgtgatctcagttcactgtggcctctgcctcctgggttcaagtgattctcctgcctcagcctccccagtagctgggattacaggtgcgcgcaccaccacgctcagctaatttttatatttttagtagagacggggtttctccatgttggacaggctggtcttgaagtcctgacctcaggtgatccacccacctgggcctcccaaagtgctgggattacaagtgtgagccaccatgcccagcctccagaatcatttctgataatactaaggagattggtgttcaggttaaattaggtttagggatgagggtggaattagggaaaagcagtttggataggtgagtgggagacaggagggaggggaggggcaggtggagggagcggaggggaggaaaggcccagtcaagtatctgttgacttcagctggtttgggggtattctggttttttgatggagtttctggaaaataaggttaatcctcccagataatggtctttggtggggcaaatcctaccttatttggttgacttctagaaccacaatgatggtttcgatgaggtttaggtcatgtctatacagcagccagacacctggccctggccccactgggggcctcgtggcccatcagggcagctgatgctgatgagggctgcacagatgtgctggggaccgggcccctgccttacgtatatacgcattctcttctctgagtctgtccaaagaccctaagtggtcagtattaaaagtttcattggccagacgcggtggctcactcctgtcatcacagcactttgggaggccgaggtgggcgggcagatcacgagatcaggagttcgagaccagcctggccaacatggtgaaaccctgtctctactaaaaatacaaaaaaattagccgggcgtggtggcgggcatctgtaatcccagctactcaggatcctgaggcgggagaatcgctcgagcctgggaggcagaggttgcggtgagccgagaccgcgccattccactccagcctgggctacagagcgagactctgtctcaaaaacaaaacaaaacaaaacaaacacaaaactttcaccaaggcttgggtgggcagggcctgcccaggggatgacctgggacctgggtgggagtcagggggtccaggcccagattggggaagggactcagggatcggaggacagaattagtgagtcccccaatctttggcctgaccccaggacagggtcccccttcccatggaaccctccttcctgtttccagaacatcccagggccccgggtgggggcactcactgcatggctgcctctggggggctctctcagcacccatggcctttatggttagcccaggacagaagtcatcgttgggcatgtgcggaatcaaggtgaatgatggtggctttgtccttgttagtggtgcccttgttagatcagagatgccaagttcctgatattggggtcagagcagctgggaggctgtgaaaggcaggtccccctttctcagaagtgttttattatggaaactttcaaacatctaaaaccagagtgagcaggggataaacccaggtgaattcatggcttcacacagcccttgtctcactcaccctccccgccctctcactggatttattttagagcaagtcccaggcaccatattgtcttctgattttttgggactgagtctcgttctgtcacccaggccggagtgcagtggcacaatctcagctcactgcaacctccacctcctgggttcaagtggttctcctgcctcagcctcccgaggagctgcgattacaggtacaggccaccatgcccagctaattttcgtatttttagtagagacagggtttcaccatgttggctgggctggtctcgaactcctgacttcgggtgatccctcccatcttggcctcccaaagtgctgggattacaaggctgagccactgcacctgaccatgttttgctttttaaaaactacaatatcattatcatattttaagatggcagccatttcttttttttttttttttttgagatggagtctcgctcagttgcccaggctggagtgcagtggcacgatctcggctcactgcaagctccggatggcagccatttcttaatatcattaaatcaatgttcacgtttcctggaatagctcatcactgaaaaacaaaacaaaacaaaacaaaaaaacagtttaggccgggcatggtggctgacacctgcaatcacagtactttgggaggccgaggtgagcggatcacctgaggtcaggagctcaagaccagcctgggcaacatggtgaaaccccatctctactaaaaatacaaaaattagccaggcgtggtggcgggcacctctgtaatcccagctactcaggaggctgaggcaggagaatcacttgaacctgggaggcagaggtcgctatgagttgagatcatgccactccagcctaggcgacagagcgggactgcatctcaaaaaaaaaaggccaggtgtggtggctcatgcctgtaatcccagcactctgggaggccgagacaggtggatcacaaggtcaggagatcaagaccatcctggccaacatggtaaaaccctgtctctactaaaaatacgaaaattagctgggtgtggtagtgcacgcctgtagtcccagctactcaggaggctgaggcaggagaatcgcttgaacccgggaggcagagattgcagtgagccgagatcacaccactgcacgccagcctgagcaacagagcaggactctctgaaaaaaaaaacaacaacaaaacaaaaaacggttggtttgtcaagatgcaaatcacagtccatattgcatttgagtgacattgtcttggtcagtaagtgtcactatcagttctgtggattcaagggaactagggtatctgaggtgaccccagggcaccaggctagtccccatcacggcagcgcacccggtctgcttcttgcctcgggaaacctttggcgtctgagagggttcaacctgatggtgtctggaggggagacgggacaagggcgcccatgtgggtcactgtgtttgaagtcaccagggccctggtgtgcagaagccaagggtgtggtcctgtgggacaggcaggggaacagccggggtcactgaaacctggctggggggctggctgctgtgcaagaagcagacctcgcttccgagcgtgagggctttgctccctgggaggttctgtggagagccgctgccctgagtctgaggggcagatttttaaagcaccctgacatttttggggtttactgaaaacttgggagcagtggtgtgctgaagctgagtcataccaggtcataagagctgatttacattttcaggagtttttgctttgcaagccactcattactaaaaaataaattgtattgatgattagtttttactaaaaaagaataaaaagtc[132 bp omitted]actgcaatgtctgcctcccaggttcatgtgatcctcccacctcagcctccaagtatctgaaactacaggcaggagccactacgccaggctaatttttgtatttttgtagagacgaggtttcgccatgttgcccaggctggtctcaaactccagaccccaagtaatctactccccttggcctccccaaaatgtcgggattacaggcatgagccaccacacccagcccccatttgccactcttatccctaaacaggggaaagcaaagcagtaagagctgagattcacctttaaaagcctctgattccaaatttagtcaccaaatgtgttgtcttcatatgaattaatgaggaacttaaggaaaggccatttgtcaggactgggaaggaagcacatctgtgtattttcttcctggaaagggaaactgaaattacgatggagccatcacccgcggtggcacccagtcggttgctgatgctgctgcgatctcgggatccctcctagactcccccaggaggcctgttgggaccatttctcacatggctttggggcacagagcctcctgatttaatggaatcacttgtgttattcagagtggggtgctcaagatcctttggggtatgggaagaaaatgcagaacttaaaattttttttttgagatgaagtctaactttgttgcccaggctggagtgcagtggcgcgatcttggctcactgcaacctccgcctcccaggttcaagtgattctcctgagtacctgggagttacaggcacccaccaccacgccgggctaatttttgtattatttatttacttatttgagacggagtcactcttttgcccaggctggagtgcagtggcttgatctctgctcactgtaagctccgcctcccgggttcatgccattctcctgcctcagtctcccgagtagctgggactataggcgcctgccaccacacccggctaatttttttatatttttagtagagacagggtttcaccgtgttagccaggatggtctcgatctcctaacctcgtgatccgcccaccttggcctcccaaagggctgggattacaggcatgagccaccgtgcccagcccctaatttttgtatttttagaagatacggggtttcaccatgttggccaggctggtctcaaactcctgacctcaggtgatccacccgcctcggcctcccaaagctggaatttattttaaaaatataactataagaaagcaattaagctttgctaatggttaatatacaaaataggaaataatatgcaaaataataggaaaaatatacatgtacactttggaaatacatgctcaaattttctcatcatgattgtgtggcccctgccaacgaccttgtgggcattttttggtacctccagcaccagatcaggatcagctctaaaaatggatgctgaacgcacaaatgtaggtaaaatgcaaactgcttcctacctcctaaggggactcaaggcctcccttccggcagaggggacaatatgagtcaaggcctatgaactgcaggaaaaggtccctgctgtaggtgacagctttcagagagaagtagctgggttgtggggtcttcctctggtttactgctcccaccacacacacccatggtttctacttagacacaactcttgtcctccagagcccaagatggtgcaaggaaattttatttatttatttgagacgaagtttcgcttttgttgcctaggctggagtgcaatggcatgatctcggctcactgcaacctccacctctcgggttcaagcgattctcctgccacagcctcccgagtagctgggattacaggcgcccgccacttaactagccaccagctcatgtttgtatttttggtagagatgggatttctccatgttggccatgctggtctcgaactcctgacctcaggtgttctgccagccttggcctcccaaagtgctgggattacaggtgtgagccaccgcacctggccggtccaaggaaataatgactcatgatcatgacttcgggagacttttggaacctgggccatgaatctcccaagtgttgcccacagactgagatggaacaggcagcaggaggccaaaggggtacactccactccccacagcccaggagatctgagtgcttaggaccattccagtccatagagcgaggctggagggtggaggaagagcattgggcccgtgtctttagccccaggtgacaggaaggaatgctgcccatgacatctgtaaccactggaatagcgccttagggatggtactagatgacttaacatgtgtgtatattttttgagacagagtcttgctctgtcgcccaggctggagtgcagtggtgtgatcatggctcactgcagcctcaaaggcctgggcttaaatgatccttccatctcagcctcccaggtagctgggaccacagttgcgtgccaccacgcacaaccaaacttttttgtagtttttatagagacggggtttcaccatgttgcccaggctggtcttgaatccctgacctcaagtgatctgcccatcttggcctcccaaagtgctgggattacaggtgtgagccacctcgcccagccatatttgtgtatattctacgacataactgtcacaaaacacctggagcccactccccgtggcggcttcactcgtgtgttcctcttctaccactagcaccaccccttcctggagcaaaccacgatttgcatttgtctattactctgtctcatcaaacaaaagctgcttcatcgcatacccctatgtctatgcaagcactacttcatttgcttgcctgtgcgtttcatgtgaatggcacccctgcagagtctcctggaacctgctctttttactcagctttctcctcctaacatttatccatattaacagcagctgttttggtttcacaatacatttatttagaaaagcaacatacagtaataggtatttcagagaattcagcaaagtataaagacaaatacaaaagatgcttgggatacaaccgctagcttctgccttccacacacagtggattttactgtaactgactagagttactctggtgccactaagttccgagccaagtctacggccaccactggaagctgtggctatttctgtggactgacgttacactgggcttcattgttctttcatttaacaaatgtgacagggaccgggctggggacacacggggaacgacagtgggtctctgcccatgggaactcacaatctaacagcgagacgaggcacaaacggctagcacaggatagcataacaagtgccacccaaggtacaggctcagggtgctacggggacctgcaagaaggccacctgagcttcgggtagctgggaaggcttcctggaggaggtgaggcccaaggtgggggtgagcctgggccaggcaaaaggcaggcctctcggcgcccatctgtggttcctcaacaccctgtgtgtgcaggcccctcagctgacctgtcttctgtgaaattcttgatcccgctctgttctattcacactgtgctgctttgccttggtggttagcatggttagctttca[134 bp omitted]tcctgggttcaagtgattctcctgcctcagc[134 bp omitted]tggccacccaaagtgctgagattacaggggtgagccactgcgccctgacttggaggttctcttacatttggtattttttcatgacacctatgactatgctttggagagagtggctgcccccacgaccctggctgggaccaagaccatcagcacttctccatcaccaggctgagccaggatgaggtgggtggtcgcagtaggtgaaaaggggccaaagatactcaaatgaaagccacagaagccacacccatgaggctgctgcctgggcagaaggcccagaataccctcctaaatggaaaaacgcaaagcacacagcgatcatgtcaagggcagtcatgtgaaagaaagaaacaaacaaacaagtatcttgccacaaccccaaactacagacaacagggcgcattcccctcatgaactccctagggacctgcgggccccagggctgctgtcgctcagtcaaaggtgatccggaagctgcgctcctgctccttgcgccggccctcgcacaccttggtcacctcctccaccttcctctgcagcagggccgagttctggtcgatccactgcagtgagtccatgtgcgcattgaggatcttgcagatctgctgcagtgggtcactggtgtcggcgggggccccggacgtgttcaggtgctcgatgatgtccttgagatcctgggccatgcgcttgagctgtgcatcgatgttctcagccagcttgtaggttttctcacgctcctcatccgcgtgctgcaggtagatggtcccgctctgctccttgaccaactcctccagtgggctcagcaggtcttccagctccttctgctgggacaggatgaagtcgagctcctggtccagcctcttctggtccagcttcaccttctccacctcgcggtgcaggctggtgatcttttctccattctcgatcagcgtgcggtcccaggcgttgacctgggtggcctgctggaggaagtgccgctcctggtcctctagctccaggctccatttgttgatcaggctctccagctgcgcgtaggtcatggcggagctggcagccgcccctgcagctgcgccagggccaggtggagcggtcacggcagctgctgtattgctggggatcccggctggcgccagtggttttaaattcaaggcaaagccggtggtgctgctgctgctggtggtggtggcggtggcggtggcagcggtggatgttgttgtggaggtgccggaagctgctccaggtgcctttaagctgaagccctgtgtcccagcagtgggggcgcccgctgtggtcacaggggtacagagggagagtccagtggtggcagatgaggttggagcagttgctattgacgcaaagaggctgggcccagtgctggtgatggtggctgtgggtgtgggagcagctggctgtgtggcacctgctgtggtggctgctggcgtggccggagtgaagggcaacgtggcaggtgccgtgggctgggctgaattccctgctgagccaatgttgaaaccggagggttgggccgtgcttccaccagtgaatgagaagcctccagatgtggtagctggagccacagaggtggtggaggggccaaacacaaagccggtgggtgctgtgccctggctggaggtgacggtgctcgatatggcattagtgaggttgctgctgcccagcccaaagccgctggggtttgccatggctggggtggcagctgtgttgctcaagttgagctttgaagcaccgatccccaaagaaaatccagttccccccgaagcaagagtcgctgttccaaaagtgaagcctgtcgtctgtgtggccggagtctgggtggcaagtgagaacaggccggtggaaggggtacttgtggctggttggaagggagccccaaaattaaaccctccagtgccagaggtggagaaagaaaaccctgtagcaggtgtggttgttgccgtctttgcagtgccaaacgtgaacccgcctgtaggggccccagtgcctccaaaattaaacccgctcatggctccggactctggtggcggcagctactctggctcccaaagcaaatccgtcggtgtctgcagccttgggaagatttctaaagcagaggaagtgacattgtcagatggcagttttggaaaggcaagctcagtggcatgactgggcacagtcggtttggagggtggtgggatgggataatgatgcatgctgtgtaacctaaactaggctctgctacatcgagaaggatccagaagcacaaaagcacgccccaggggtcaggtacgaggagccggggtgctagggacgtgcgtggccatgttcagcccagtggaaagctcccactctgtggaggacgaggcgggagaacaggaccttggacccacctcagcctgaggagatcagatttgaggcactgccacaagcgggactaggacacacaagaacagctgtaggacctgctcccagcgtgggacccagtgaggttccctggctgactctagcagggtgtgagcggatcagctcttgccaccctgagggcctctctggacctcagagagagagatggggccgggaacccaggctggatggcagggtctgggttgctgaaggccccccaggcccacacctgcactctctaagagcaggagaggacactggaactcctcctcctaactcaggggagggtctgaaacccatgtgctcagagcacagatgcccctggctgcagtgattggctcaaggataaactgagacctgagccaggcaatcggagcctcccctggggttttctccaggcttggaaggcagctgcctccttcacctgtaggtgtggtgtggaggattgcacctgggcctcccttggacaccttctcaaccatctgcagacactgggacatcacgggagaccatgagccccaccagagatgggtgggggtgggggtgggggagggataaagagcaccccagaagacccatgggccacagtatttccattcagttcaaactgacttgattttggtaatgtctaactgaaaaatctcccagtggtgccatctatcagcaggaaggtcaaaggttacctggtgaggaaagggtgagagggagtgctgaataggggtggtttctttttcttttgggaaagggtttttttctgtcatactagctggaatgcagtgacatgatcacaactcactgcagcctcaacctcctggacccaagtgatcctcccacctcagcctcccagagtagctaggactacaggtgcatgccaccatgcgtggataatcttttttattttttgtggaaatgggatctcactctgttgccctggtcttcaactcctgggctcaagcgatcctccctctttgtcctctcaaagtgccaggactacaggcgtgagccctaaagatgatcagcagtatccttagaagacggatttgactgactggagaagggaagaaagcttgtggtgacacgagcagactggagtgatgcgctttggaatctgaagatgtgagaaagccaggagccaaggaaggcagaagcagctctaaaagctggaaatggaaagagggaggccctgtctcaaaaaaacaaaagaataatcaaagtcaagactgagaagccaagtgcctgacccagagaaacacccacgaggtctgtttcctcttccctctctccaggccagtttttaaattgcttggtgtctgtcctcaggaaatccccttccagcttgagtaagaggcaacctatctcactacccccaccccttccactgcacccttctgcttcctcacaggcccctaagttttgtttcgtctgctcctccttctccacacagccaagcaagcctggggagatgaccccagggccagctgcacacgctctgccttgtctaagccagtagatctcaatgggcgtccatcactactgactgggagcattcaaaatacacaaggctgttagctccactaagccagtctctccggggctgggatgctgtggccctggcattttcataaagctttcctgggggattctgagaaaggtctcttcaagaggccacggcaagtgcctgagcccccaggactgctggggcctggcccggcctacatccattcctcccgttgtgggacagaacaaaagtcctcactgctgagccacctcaagccggtgtgttgttactggcagctaaaggcatctgagcagctacacctacacatctcagttctcaagaactcagcttaaaaaagcttttgctattaataagttgtagctaaaatttccaagaagagcatttataaaaagctctttgcaactatgaaaaaactacaaggaaaacaatcttctatggggacttgtctggcttaacagttcaccttttttttttttttttttttgagacgggagtctcgctctgttgcccaggctggagtggaatggcatgatctcggctcactgcaacctccgcttcccgggttcaagcgattctctcgcctcagcttccaagtagctgggattacaggcgcatgccaccacgcccggctaatttttgtatttttagtagagatggggtttctccatgttggccaggctggtcttgaactcctgacctcaggtgatccgcttgcctcggcctcccaaagtgttgggattacaggcatgagccactgcgcccggccaacagttcaccatttattaagtgccacattggtttccaatactcaggtgccagggatctattcacaatggtga[137 bp omitted]catagcgagatgctgtctctacacaaaaaacacaaaaatgagttggccgtggtggcaggcgcctgtagtcgcagctacctgggaggctgagatgggaggatcactggagcccagggaggtggaggctgcagtgagctgtgattgtgccactcactccagcctgggcaacagagtgagaccccatctaaaaaagaaagaaaggagacctaccattactcaccgtttcctcaaagcaaactttggggcagatccacttgacaaatgaggaaagtgaagcccagagtggctggttaagccacggtccctgccctcaaggcagccagagtcaaatgtcagctctacaaccagggctcagggcaggcacagggccgggccacatgctgtgggagcaggttccagggagaagctgagcgttgcagatgcagcatcagccagggaaaggatggcgggggagaggcgccgtccacgcgggaggaaaggcctgtgtgaagacagggaggcccacacagcagacatgcctctgggtgctaagtgatctggtgcttctgaagggagatgtttatgtgtgaaggagtgacttggcaagcctgggctgttcaaatctgcacattccaaagagagaaaatggcccttgaccagctccaggagaatctctatgttcttgaaatgtgctgccagataagagcgcctttgtttacctggggccccaggccactctagagagtccatgttgacgctgtgacctagagtgggggctttgggtcatacagtatcagcacgacctctggaggggctggagtcagcagacctcagttcagccacacgggtgcgccatgtcctccccacaacccgggccgccactgctccgtaagcgttaccacacgctgttgcagggagaactgagcactgtccgcgggactctctctacctgcagaggagagctggaagctcgtgcctggtctcccttggggcttttgcatctctcccctttgctgttttcagtctgtatcatttctccataataaaccgtgaccgtgactgtgagtagaaagctttgctgagctctgtgagtcttagctcatcactgagccgcagggtggtcttggggactgtgggccacgtgacaggcgggagaatctggcagacccatacataccatgctaacggttcgggcgttatattgagggagccacaggcggactttatgggtgtgggggatgaaccgtaggggtagaggctggaggccaggtggcttagagaagactgggagaaggtccaggccaagagcctgaggcccgaactggaactcagagaggacagcatcacaatttgagcaaagtgttaaatttgcaccaaaaccacagggtctgtccaggttaacagtgacaggccaggcatgatggctcacacctgtaatcccagtactttcggaggccaaggcaggaggattgcttaagcccaggagtttgaggcaaaaaacaaaaaacaaaaagccacaaatactagaacttgggaagtttctcacaaatgcaaactattacgagctctgatcccggaattaccacatttgccaaaggggagagtttccttaccaaagaagctgatggtgctggtggcggtggaggaagcagggaggaacccaaactgagggagtgttgcatttccagggaaaggaggagggtatgcctgggcctgtgctcagggctgggtggctgtgaccatctgtagttcacccaggcaggacacagctccagagaagcgctgccttgaggtcaccaaggaaagtgctggcagagccgccagtcccttcccttcctgcctgcctgccccaacatttacccttgagtttcaaacaacacggccgccttcacagccctgggaacccggaggaagacccgcttgggattcagatgcggaatcatctgaattcaggtgggcatatcccacccccatctgtgagaaccagggttctttgctgtcaccccagccttcggtcagctctactaccttacctccatctgtgattcttgtgccactccaagtcccagtttttttttttttttttttttttttttttttgagatggagtcttgctctgccacccaggctggagtgtggtggtgcgatcttggctcactacaacctccgcctcccgggttcaagcaattctcccacctc[134 bp omitted]tggcctcctaaagtgctgtgattacaggagtgagccactgtgcccggcccccaacccctttccttagatgcctgggacaggagtctgtgcctgggaaagaatacaggagacctcagctttggaccaaaaggaaaggaagaattaggaaggatgtgtgctatgtgtgtgggggggtagacagaaaaacggcccccaaacatgcccacactctgatccaggaccctgtcaatgtgaccttacatggcaaagggactttgcagatgtgatgaagataaagaggttaccctggcttatccacgtgagccccaggtgaccacaggggttcttcagggaggcaggagtcagagggagatgtgcctatggaagaatggactgagagacactgtgctgctggctttgaagatgagggggccacaagccaaggaacacaggcggcttcggcctctagagctaaagaaggacatagcctctcccctagagtttcccagaggaactacacaccatgcacccatttagactctggacccccagcactgtgaaaatacattcgtgttgctttaaaccactacatttgtgatgacttgttacagcagccactagaaaccaatggcggtaggttgagggacgatggagaaagaacagaatgaaatctagataggtggatgggaatacacagagcagagctggggttgagaaaggggctggggtcaggggcaggtctgcccttgtgcatggagaccaaggcggctggtacagaaaggaaagtgaggtgtgattctgaaaatccagacatcccctggtgctggggcaaccctgccaggactgtggatgtgtgtgggtggattgccactgacacccagccacgataggccatctatgatgggagggaaggacaaggttgcctccgaacacagaggaaggctaacggtggggatggtgtcggctccactgggccagatttccgtttgttccctgctgtattcgcagcacctgcagcagtgcctggtacacagtagggactcagtaacaaccatttactagggacctactgtgtaaccggcaccgtgccagagcactgcactgcagcacaccgagcccttcctgggtgggaaacaagtgcagactccccaaggccacccagcaaacagcagacccatgatgggaaaccagagctttccagggccaagtcttgacattctgcctgggacgggagagtttcattgaggaaaagatgttagaattaagtgttggccaagtgtggtggctcacatctgtaatctcagcactttgggaggctgaggtgggtggatcacctgaggtcaggagttcgagactag[256 bp omitted]accccgtctgcactaaaaatacaaaaaaaaattagccaggcgtggtggtgggtgcccgtagtcccagctactcgggaggctgaggcaggagaatggcatcaacccgggaggcggagcttgcagtaagccgagatcacaccactgcactccagcctgggagacagagcgagactccgtctcaaaaacaaaaaaacaaaaattagcctggcatggtggcgtgtgcctgtgatcccagatagaggtgggaggatgacttgagcccaggagtttgaggctgcagtgagctgtgatcatgccaccatacttcagcctgggcggctgagcgagaccccgtctcaaacaaataaaaaagttctgggaggcacttgaacaaaggcccatggcattcggctgacagccacctggtggcactgctgacaacgcagagcccagatgcaagacggacagggtgcggagctgtctccgtgggacctcccctttccccatggaattcgttatttcagatttgggggaagtatgaccggtggaaccagagagaccagaacagggcagaaaagagcagagagtgagggagtggagaggagagaaacaaggggagatcagagatgggctgggctcagcccagggaaatttgattcctgctgaggctcagacgccgtcctccaacactgccttccctcacttgccctcccgtgggaacctctggccaggaccatctccatgagtgctagtgctgggattctccgtctgcaaactccacaagtctaactactctgcttcttaaccgtctcctgaatcagttcctctttcctttgcgtcaaagaaaatccccctaaaccttgaataacagatcagctccaagtctgcccttcaagaactgaagtcaactgaccaacaccttcctaagtggaccttagccaaggcagatgctcaagcggtccaggccaaatggccagaccagagtgccttgggagcatgagaccatgagtgggtcagggtctgggttatgttgggaaagactcaccgagactctgtgtgggaggagtgaggagactgttgcagtcgcctggcgggagctggcggtggcctgggctttcctgtcctgctctcttacataactaccctgcctggggtatggccaaccccattggtagaaaacagagtgggccagggatggtggctcgcgcctgtaatcccagtactctggcaggccgaggtgggtggattacctgaggtcaggagttcgagaccaagctgaccaacatggtgaaacccccgtctctactaaaaatataaaaattagccaggtgtggtggtgtgtgcctgtaatcccagctactcgagaggctgaggcggaggttgcagtgagccgagatcgcactactgcactccagcctgggtgacagagcgagactctgtctaaaacaaacagacacacaaaacaaacaaacaaacaaaaacccaaagccatggagagggtctgctttcctttttctttttttttttttgagacagagtctcactctgtcatccagtgcagtggtataatcacagctcactgcagcctcgactttctgggctcaaatgattctcctgccctagcctcccgttagctgggactacaggcatacgccgccatgcccagctaatattcgattttttgtagagatggggtctcactatgttgcccaggctggtctccaactcctgggctgaagccatcctcccacctctgcctcccaaagtgccaagattacaggcacgagccaccacgtccagcgagggttgcttttctaagccaaatctgtgacatggaagagctcccctctcccacccctatatgttcacctccaccaaaaggccacctctcctccacagaaccaggtatccccaatagtagggagggaggaagggacagggatacctgtgggttttcaactgtcctctctctctcctccttaggtcacctggcattctggtcccattttcctccctgatgcctttcaacctacaggcataaccgacttgcattaaggacctgtgtggagacaaaggaacagggtgtgtgtggctgtgtgtctgtcagctcctcgggggagaagctgtgatggatcaagctgtcttccccaggctgtcactggaacttttactgcatgttcagatgtttcaatgcctaaatgttcccgtgtgctcactacccaggaggccgcaccaccctgccacaacccagtgacattggtgggcatttaaagacataaaagctaggccgggcgcagtggctcacgcctgcaatcccagcactttgggaggctgggggggggggggcggggtgtgggggggcggatcacctgaggtcgggagtttgagaccagcctgaccaacatggagaaaccccatctctacaaaaaaaaattacaaaattagccaggtatggtggtgcatgcctgtaatcccagctactcgggaggctgaggcaggagaattgcttgaacctgggaggcggaggttgcagtgagccgagatcacaccactgcactccagcctgggcaacaagagtgaaactcggtctcaaaaaaacaaactaactcattttgtgaataggtagtatgttcacattgttgtagctcaaaaggtacaaaagggaatagtgtggcctgtcttccctgagtcccacagcctcccagccctgctccctggagacaggctgctgttgcacatctttgcagagacttgctgtgcgtttaaacaaaagcgtggttggcactatccccacctgcacacaaaaggccgcctgctacatgcactgttctctactgttctttatgtatcttagaaatcgttttaagcaggcttattctcctcacccgggtagatgaggaaaccgaggccctcagagggggcgacttgcccagggtaccaaaatcctgcctctgccacttgctacacaggatggcctcaaggcagtagctaaatgatttgtggattcactgattttcaaccttctctcctgctttcccctgaagtcacctgacggctaattagcagctactttctccttcccactccccaggcccagaagctaccaaaggagctctggtcgcaggaccaacagcaattttccccacaggaaaaacgaatcagctaagacaaccatggaaaagttaggaaacagccagagagagattttaaggaagattctagaaccaccgcttgctcttaatataaaaggactggaagagatttgaggaatactctggtgccaaggcttcttcctttttggccaataacttttatttcttactcttgtattgaaagttttttcccctctacctactgcattaaaaaaaaatttttttttttctaagacaaggtctcactctgtctcccaggctggagtgcagtggtgcaatcacgctcatagcctcaacctcccgggctccagtgggcctcccacctcagcctccctaatagctgggattacacatgtgtgccaccacaccagctaattttttttttttgagacggagtctcactctgtcatcaggctggagtgcagtggcgtgatctcagctcatcgcaacctctgcctcccgggttcaagctattctcctgcctcagcctcccaagtagctgggactacaggcgcgtgccaccacacccagctaacttttgtatttttagtagagacggggtttcgccatgttggccaggatggtatgaatctctcgaccttgagatccgcccacctcggtctcccaaggtgctgggattacaggcgtgagccaccatgcccggcctaggagtttctttttagcgtgatgaaaatgttctaaaattgactgtggtgatggctgcacaactctgtcaacgtactaaagccactaagttggacactgataaatggatatggattatacagtatctcaataaagccactcaaccaaccaaccgaccaaccaaccaaccagggggtgctgggaaggggttgagaggcctccatgaggctgtggaggcggataggcgtcaggctcagagctgactttaccccgagggcaacggctcgggcagagtttctaagggcaggcccatgccttccttggggtggccggtaatgctggttgagaacaggctggggaagagcctagagctgaaacgctctggttggcggtgcaggcacaggacatcaaggcctggagagggactgaggcatcagggctgagggactctgagagcagcggacaggcgtgtgtggcgggggaggaacggcgcacacctgtgccccatccgcagcccctcttcttgtcaacatcagcttccccggggagaggcagtgatgttggtgggggaaggagggaagggcccaggccgggctgtggtggagacggttgctatggaggtttctctgggaaccaggtgaaggcagccagaagatgggggcagggtggctttcattatgagaactggaagcaaacacagccccttcctgcctcggcggacatctccacacccacatttcatggcatttctcacgcgctgggctgtttccagggcttcacctgttctcactcacttaactttcccccagcaatgtgacgaagcgaaactatcatggctcccatttataaatgagcaaactgagaaaggggagaggacttcagtcacctgcgtaaagtcccacaaccagtaagggctggcccaggtgtctggccccacagctgagctcctaaccgcaccgagcctctccaaaacatggtctttttttgctccccactgccaccaccatcaccgtcccctgcctcatccagtcccccttcccattctccagagacttcctgggccatctccatgaccttccagaccagcctgggcttcactctcaaatccaattcaggatgatccgcccgccccagctgcagacgatggcctgagacgcctgcagggaagagaggggcgtccgctgctcgccaacccccatacgttcctgctctgtggtaggtcaggaagaagagggcaaaggagtctgcatcaaactgggctaaggcctggcgctctgatggccgctgacctcaaaactctccatggggggtacccctctgcccattgagggggcacctagggagcctaggggtcccgtgaggccctcccaccatggttccccgcctctgcctctccccgcagctccgaccatgaccatccatcctatgagtgctggctgggctcaagcccgggtactttcctccgtgcccaagcaaccctgtaggaaccacatatcctgggccagacgaatgcaggagctgcctcctctggacacagcggtggctctcacctcccttccatcttggcaggatgagtgcatttgctgcgagaaagcagccccgacggcagggccctagggccccaggccaggccaccacgaccacgagggaccaagacaacaagcccactcctgaatcacgcctcaacacagacaacatgatgtccaaaccacagaaacgaccaaacacccctcctgactcagagctgctggctgtttctcaactaaccccggcggcactagctccctttgcttctcaggctctaggtcaaatagatgcgagtcatgggcttgcccctgacacagcccaactcctcaagttagcccaaacgcctccttattgaggtgccctgcgagtccctgtgggggacagtcttcctgccgcaatgagcaatgtgctcctggtggcctctggctgggggcatggggattaggaagagagtaataagacaccagccccacttccagcaggcatcctgaacctcaggaaggattctttaggcctcctcctctgctccccagaaacactgtcctcccctccttcacatgggaccgggctgtgtcggaatgaagccctactccgtctcactgcttgtaaagtccagcacagaggggaccagcctcaatcctcggagactcttggaatgagggctgggttccttttgctctctgctgtggacagagaggatgacagctgtggggaggggaagtcacagagggccagcagcctgagtcctgtccacactggtggtttgctggggttttccaggtttttctgaattacttgcctacctttaaaacttggatctcacagaaaaaaaaaaaactggatttccagcttctcccgtgaaaccagcagctttgcaccaccagcgctgccagtgttgctgcggccccggtgcctttcaggggcccaggtgcttctgggagccacccctccctctgggcctgacacagggcccaaggtggtcagcagttcaccggtccaggcctcttcccatgtcaaccccctgcccctccacactgccccaaggtagttctatgattgtgcccattttactgatgaggtgaccacaggtcggggggtacagtatcttgtcccagaccactaagcggtgagtgatggcatcctgggctctaggacactggtgtcagttgttatcagtttgctgtgtccctttttttttgcataagagctgtgactgcttctactgaagggacaagggcaggcacaagggagggaaggggctctggaggactgtgggccacgtggcagcctgtgctgtctcccagcccccgcgtcatcctctccccaactgagctggccttggcctacctgcccttgtttgccaggactcccaccttcaaccccggcacccctggcctgcgtgacccagttaccctccctggctcctctcagggacctcagtatcacattcgctggcctctgtgctgagcaactcattagaaaatgtattgatgcctacggaaatagcagcacagggcggggggttgtggggaacgtttctgggaatgaggagggccctgactttgccctcgaagcgttcgggggagcagtcacgtaggcagacatctgcacacggcggatctgaaagcagaagcaggcgtggcgagaacagagagaatcacacacagacccgggctctggcagccgccggcttcactgatgccatctccacagcgctcccacaccaggccccagagcaggaactactgctcacagggcatttccctatgccaggccccactctaggtatttcacgcacatttacacatttaatcctcaaaaccaccgtctgcaatggaccatctcatccccattttacggaggggaaactgagtcatagaaagaggatgccacttgctgagggtcacagaagtggtggagttggggtgtgaacccagcaggctggctctagggcccatgctctgacccacgctgcggaaggcagccgaggctcggcagatgagggccctgcctgcactccagtctacaactgagtgctgggctcaggaccagaaccccggtctgtctgatgcaaaactcggagccttttccatcatgccaggaggccaccgtgattgggaaagcagtgaggagttgcggcaatagcagggcgatggcacggtgcaggtgcaggcaggaatcgatagcgtctggcaactgtgagcagcagcaggcctgaggtgagggtcagggcttggagacctcccagagactacaccatgggcctcggggccctggaagctgtgcagcatggtggaggctgaggtcccatctaactggcactgtgattttcacaaccccccttacctctcgggacctcagtcttgactcctgctaacaagcctctgtgatctgaggccccttcttggcaccgagcctcagattctcagggtcctgcacgggtggctgatctccctccctctccacaccacccctactcttgctgtgcgggggttctcccttatccaaggctctgctaaccgggagcggttgccaggtgtgctggggtccccagagaatccccgaactccccgtccccgtcaaacagccagggctgatgcaacctgcctgcaaccaccgcctcactccccaagccaggcccctccgcaccgaaaaagagtccccagtagccccacccttgcttcaagccccagctcaggagttgaaggggagctcgaggctgggggaggccaggacatgagtcctgaaggggccacaggcctgggtcaggaatgtgcacacgaggggactcagggttcgaagatctggggagaagggtcgcaggcaaccactgatgaccggctatgaactagaacaggctgggaggggctggagagctaagggtgccaactggcacccactcaccctgagtccagctgctaagtctggctgggctgaagtgggtgggacccaatagctagagagaaaaggcggcaaaacggtggggaggggaagcagagtccctgcccagacacctctgcagccagcataaaccgcacatagccagcaatgcaattctcctactgaccaagctattaaaaattacccacaccgggccaggcgcggtggttcacgcctgtaataccagcactttgggaggctgaggcgggtggatcgcctgagttcgggagttcgagaccagcctgaccaacatggagaaaccccgtctctactaaaaatacaaaattagccatgtgtggtgacacatgcctgtaatcctagctactcgggaggctgaggcaggagaatctcttgaacccaggaggcagaggttgcggtgagccgagatggcaccattgcactccagcctgggcaacaagagtgaaactccgtctcaaaaaaccaaaaaaattaaaaaacaaaacaaaacaaaaaacccaggccgggcacagtggctcaggcttgtaatcctaacactttgggagggtgaggcaggaggatcgtttgagcccaggaatcaggaattcaagaccagcctgggcaacatagtaagaccctcccccccatctctactaaaaaaagccaaaaaaaaaaaaaaatagcatcctacctggccatcctctcaatatcccgcaatcccagtctgagacaaaaccaaatggaagcacattccataaaatacccaaccagcatttttccaaactgtcaaggtcatgaaggacaaggaaagtctaaaaccagtcacaggccagaggaggctgcggagccatgatgcctaaatataacgtggcatcctgaaggcatccggaaggagcagaaagggcattaagtaacaactaccaaaatcagcatcaagtgtggtcagaatcaagaatggcatttggtcaatggtaacatactgatgttgccttggttgtgacaaatgtggcaaagtaatgtaaaatgttaatggaaaaaaccaagtgaggggcatacagaaattctccgtattatctttgcaacttttctgttgagtcaatctacaattattccaaaataaaaaattttatttaaaaaataacccccttgggtacggtggctcacacctgtaatcccagcactttgggaggctgaggcaggcagatcacgaggtcatgagttcgagaccagcctgaccaacatggtgaaaccctgtatctactaaaaatataaaaattagccaggcatgatggtgcatgtctgtaatcccagctactctggagcctgaagcaggagaatggcttgaacctgggag[142 bp omitted]gcattttgggaggccgaggtgggtggatcacctgaagtcaggagttcaagaccagcctggccaacatggcaaaaccccgtctctactaaaaatacaaaaattagccaggcgtggtggtgggcgcctgtaatcccagctacttggaaggctgaggcaggagaattgcttgaatctgggaagtggaggttgaagtgagccaagatcatgccactgcactccagcctgggcgacacagcaagactctgtctcaaaaaaaccaaaccaaaccaaaccaaacccagtccccatgtacaatctagaagatcttcgtaggaaaagattctaccggcggggcgggggagatagggcacgtctgtgcgtccttaccactggcagtctgcccaacagtctacccttaattccatctgcttttgttcaaaaatctatacagcaatggaatgagaacacatccaccttaattacagcaataacaataaccacttttatgcagcacctactgtgtcccaggcgttagtctaactgctcgacacggattaactcatttaatccttgtaacagccctaagaagtaggtacttttttttttttttttttgagacgaggtctcactctgtcacccaggctgcagtgtggtggcacaatctcggcttactgcaacctccgccccaccccagggttcaagtgatcctcctgccttagcctcatgagtagctgggaccacaggtgcaaaccaccacacccgactatttttttgtatttttggtagagacagggtttcaccatgttgcccaggctggtctcgaattcctgagatcaagcaatctgcccacctcagcctcccagggtggtgggactacaggcatgagccaccgtgcctggtccagaggtaggtattcttaatgccacttcgtaccacaggggaaactgaggcacagggaagggaaatggccagggtcacacagctagtaagaggggtgcagtcaagttttgaactcatataatctggctccagagtctatgccaggtatgtataaaatttggcttcctggggccacattgaagaattgtcttaggccacacataacatacactattgatagctgatgaacttaaaaaaaaatcgcaaaaaattcgcatgttttggtaaggtttacaaatttgtgttaggctgcattcaaagctgttctaggccgcatgcaggcccacgggtgggacaagctcagtctatgctcttagctgctactctgtatactgcctcagtgataacacagcccctataggcccaagaaaatatagggcaagtgctcaaaaactggcagagtggacagtaagtgctctaagggaaggtggtcagatcccaagaaggacttcctgcccgcaacaggtaaggaaggagaaagaagcttgtgtgtaccgctcagtatcaggattcctccaccttctctggaccttgattcagtctcctaactgccacagaagggatgaaggttgaactccagctgggatgtcctgatgtggatgggacaaggtgggtttctgcaacagagaaaagacggacatccacctcggctggtggaggagggcccagtgcatgagaaggggcaagatggctaccctgtgactaaacgaaaacggagatcttccatttttggcagggttgggagatagttcctatccagtggaagctgaaggacggtttgaaaggaagccaagggcaagggatggagaaaaggacgcagctggggcctcgatgtctgaatccctgccaggggatggggcctgggcacccatcatttggaatggaagatgaggatagctggaaacagacactttagagggatgagggagacagaagaatgacagcaggtgttggacagtccaacgtctgcggctcttacaagtggtaaggaagaaatga[355 bp omitted]agttgagctctgtgcataaggcttgccagacatcgtcttatttgagtctcataaacccaccaggcgagttgatttttcttattttacagatagggaaatgaagtaagagaacttaagttatttgcccgaggccatcctggcaggtctgtatttgggagagtgctgtgactcatgctggactctaacccacgagggtttctcagagtcagcagctgggggatgaagaagtgaaaagtgactggcaggaaattctgcaagcaaggaaagggaaagagaaatgaactggtgcaggtctgcgggaagagaatgaggctggatcctcaaaatcacaggaggaagcaggcccagacctcagaggcagaaagagaaagaaaccagagcttagagtcaggaggaggaaaccagaccccggagccacaaggagagggctggatccccggctcagagggaagaggtcggatccccagctgagagggaggagggtcccggaccctaggagtgggaaggaaaggctcggatcccctgatccccaggaggaggggacccggctgcctcccggttggggccgcgcgagggcggggcgcggaaggatccgggagggccgtgctccgccacccagtatatatctgtccccagtccccggggccgcctcattccctgtcctcggatcacagtctcttctcactacagtgtcgccgcctctgcctgcgtagccccggccatggctctgtagcctcgacccctttgtgcccccggcccgtctccgcgctcaccacgcctgcgctctccgctcccaccttctttcttcagccgaggccgccgccgcctctccttgctgcagccatggagtgagtaaccgcttacctcttctccaactgcctttcccgccctttcgcagctcgtggccctctttagggagccctggggggtggggagtcgcgagcggggaatcacggtcgcgcaggcgcagaagtagtacggtgggccgaaggcgcgcggctgcgcatgcgcactgggcccggggccgggtgggagagttctagactcgatgtttgtcagcccgcgtgcagctgggcctgagcactccaggggagggtgtgttttttttttttctaaacgattcttcgtgcttggttgttcctgcgcagtagcccaccagtgccccgtagtgaaagagctgcggaccctgaatggccgcacatgcgcattgatccccaagagggcggaggtgtaaaggcaattggaccgctcgggcgacgtagcatgcgccttggccctcggcgcagagccgcgtgtggacgggtggcgttcgggtagccgttctccgcgtgccccctctaccctcctccaccctccctgccccacgttgctctggctcacagcccagcttccttccttttaaaccaggcacctgctgaggcggggactggcttagattgacagggcagaaggcgggacccagaggcaaccctctaagtgggtggggatagaaccactgtcgtcacgatgggtgggatttcggaagcacattgtgagaaggggcggggctaaaccaaccgttagttgaggggtggggtttcgatgtgacaaagaggcggggcctctggggaatcgggggaggggcggagctaaataaacaatgaggggcggggcttggaggggcagcggcagagcgaggagtgggatttgagtggataacattgctgaagggctgcggcctggggcagttcccctgggaactggtttgggatggaagctaggaaggcagtggggccaaaaggaaatattttagaggaaggggcgtggctggaagaaaatgtccctgggattgagtttttccttgaggcgaaatattctgaggtggatgggaggggcctaaggtaattcccctgggagacctttaggttttttttttctgtattgggggaaggggtggggcatcggtcctactttaggacctaaagaaattcccttgggagtgggtggggctcagagatttgggtaaagaaagggcaaatttagaattcggagaggctgaggcttagtgttctaaacggtggttggaagggggagggaggagcctcatggacgtgcctgggggtgtggcttggcttccccttgattttggccggtggatgacgctgtcctgaccacacccactcttgtctcacgcgtgtaggtcttccactttcgccttggtgcctgtcttcgcccacctgagcatcctccagagcctcgtgccagctgctggtgcagcctctcctgttgccatcagtgcccagcacctgtgctacagccatgtcactcctggcgaccctggggctggagctggacagggccctgctcccagctagtgggctgggatggctcgtagactatgggaaactccccccggcccctgcccccctggctccctatgaggtccttgggggagccctggagggcgggcttccagtggggggagagcccctggcaggtaagggcaggtggaaggtggagctggggagtggagggcaggggaagatgggggaggaagaactcatccatgtattcaataaatattgagtgcctacaatgtgccaggcactgttttaggtgctgaggatacggctgggaacaagaagaacatggtctgtgccttccagcagctcacactgtggggagtagaccagagataaattaaatgagagtgtattggaataagtcaaaaacacctagcagctgagctacaaaatgacaaaggggacctaatatagaatgggtagccagaaaaccttctccaagtaggtaacatgttgactgaggcataaatgatgggaaggaagccaggcatgatggcctgtaatcccagcactttgggaggccaagcggggagaattgctttagtccaggagttcaggacgtgggcaacatagcgagacctcatatctataggaaaaaaaaaattagccaggcatggtggctcacgcttgtagtcacagctacttgggaggctgaggtgggaggatcgcttgagcctgggaggtctaggctgcagtgagccaagatgatgccactgcactgcagcctgggcaacagagtgaaaccctatcccttaaaataaaaaaaaagtagggaaggaatgaggaaaacacccaagggaagagcattttagttggagggaactgtatatgcagaagccctcaggaggcaggaatcatttcattcattactgtatcccaaatgcttggcacatagtgggttttcaataattaatgagtaaagatgaaacaaggcatatgtgcgtgtgtatctgtgtgtgtaatgtgatctagtttgccttttaaaaagagagaatagagacaccacagatacagagtactcggtaaaggagatgttggaatggttgaagaaatgcttggttgactgttgcttgagtcattggttggttggctggttctttttttcttttttaattttttttttctcctggaccctcttatgggttaagactgattctttcattggctaatttgttgggttttggttaactggttcattggttgattaatgggttgattggttggttgactgatttatttggttggttgaccgattccctgattgattggtcgactagttcattggttggttggttggttggttggttgactgggtggttagatggttgattgttggttggttcgttgactggtttattggtttcttcactggtttgttggtttattgactggtttgatgattcagtggttagttgttttactgaatgaatgggacagatgcacctgaatgagacgtgagtcagcacccaactacgcagaagaccagcaactcagggaattttgtgtccctccccactttaatcccaggtgatggcttctctgactggatgactgagcgagttgatttcacagctctcctccctctggagcctcccttaccccccggcaccctcccccaaccttccccaaccccacctgacctggaagctatggcctccctcctcaagaaggagctggaacagatggaagacttcttcctagatgccccgcccctcccaccaccctccccgccgccactaccaccaccaccactaccaccagccccctccctccccctgtccctcccctcctttgacctcccccagccccctgtcttggatactctggacttgctggccatctactgccgcaacgaggccgggcaggaggaagtggggatgccgcctctgcccccgccacagcagccccctcctccttctccacctcaaccttctcgcctggccccctacccacatcctgccaccacccgaggggaccgcaagcaaaagaagagagaccagaacaagtcggcggctctgaggtaccgccagcggaagcgggcagagggtgaggccctggagggcgagtgccaggggctggaggcacggaatcgcgagctgaaggaacgggcagagtccgtggagcgcgagatccagtacgtcaaggacctgctcatcgaggtttacaaggcccggagccagaggacccgtagctgctagaagggcaggggtgtggcttctgggggctggtcttcagctctggcgccttcatccccctgcctctaccttcattccaaacccctctcggccgggtgcagtggcttatgcttgtaatcccagcactttgggaggccaaggcaggaggatcgtttgaggccaggaggtcaataccagcctgggcaacatagtaagaccctgtctctattaaaaaaaaaaaatcaacccttcttccccaccaaaccacccaactcctctctactcttatccttttatcctctgtctctgcttatcacctctcttgcgtatttctggatctccttccctcctttctcgtccaaatcatgaaatgtttggccttagtcaatgtctatgcccgtcacataacagccgaggcaccgaggcccacagggaagcagctgggagcttggaaacctggt
